United States Patent Application Publication US 2025/0235397 A1 - sequence listing, part 16

SEQ ID NO: 18 - DNA, 4010937 bp, Bacillus subtilis (residues 1-2,005,469 of 4,010,937)
  source 1..4010937: mol_type = genomic DNA
tttatcaatatattttggcggttgtggcgaagtggttaacgcaccagattgtggctctggcattcgtgggttcgattcccatcaatcgccccaaataaaaattgcgggtgtagtttagtggtaaaacctcagccttccaagctgatgtcgtgggttcgattcccatcacccgctccatttctatgtcgtcatgggcctgtagctcagctggttagagcgcacgcctgataagcgtgaggtcgatggttcgagtccattcaggcccaccatgacttttgttccacagtagctcagtggtagagctatcggctgttaaccgatcggtcgcaggttcgaatcctgcctgtggagccaaatggagaagtactcaagtggctgaagaggcgcccctgctaagggtgtaggtcgtgtaagcggcgcgagggttcaaatccctccttctccgccatatgattacagatatcataattatcggcccgttggtcaagcggttaagacaccgccctttcacggcggtaacacgggttcgaatcccgtacgggtcatccagaagccttgcatatcctgcaaggtttttttgtttttataaatcatgatatgtcttagattttgttctttattttaaaaacagactacaaaaatctccatatatttcgtttttcttcagaaaatgaagttaattgtctataagtataagcgctttcaggaaagggcttttttttatttcttcgaataaatactataaatgaaaactatgatgtcagaaaggatgattacatggccgctgccagcctgacagcacatgatgtttatctttttcacgaaggcagtctgtttaaaagctatcagctgtttggctcgcattaccgcgagctgaatggcaaaagcggatatgaattctgtgtgtgggcgcctcatgcgtcggaagtacgagtggctggagattttaacagctggtctggagaagagcatgtgatgcacagagtgaatgataatggcatttggacgttatttattccaggtataggagaaaaggaacgatataaatatgaaatcgtgacgaataacggtgagatcaggctgaaggcagatccatacgctatttattcagaagtcagaccaaacacagcgtcacttacttacgatttggaagggtacagctggcaagatcaaaaatggcaaaagaaacagaaggctaagacgctgtatgaaaaacctgttttcatttatgaactgcatcttgggtcttggaagaagcattctgatggcaggcattattcctataaagaattaagtcagacgcttatcccttatatcaaggagcatgggtttacccatattgaactgcttccggtgtatgagcatccatatgatcgttcatgggggtaccaaggaacggggtattacagcccgacaagcaggtttggtccgccgcatgatctgatgaagtttgttgatgaatgtcatcaacaaaatatcggagtcattttggattgggtccccggacatttttgtaaagatgcacatggcctttatatgtttgatggagaaccgctttatgaatacaaagaagaacgtgatcgggagaactggttatggggtacggcaaactttgacctggggaaaccggaagttcatagttttttaatttcgaatgcgttgtactgggcggaattctatcatatagatggatttagggttgatgcagtggctaatatcctgtattggccaaatcaggatgaacgccacacgaatccatatgctgttgattttttaaaaaaactcaatcaaaccatgagagaggcatatccacatgtgatgatgattgcggaagattctacagaatggcctcaagtgacaggtgccgttgaggaaggagggcttggttttcattataaatggaatatgggatggatgaatgacgtactgaaatacatggagacgccgcccgaagaaaggcggcattgtcatcagcttatctctttttcattactgtatgcgtttagtgagcattttgtattgccgttttctcatgatgaagtcgtatacggaaaaaaatcacttctcaataaaatgcctggcgactactggcagaaatttgcccagtatcggcttttgctgggctatatgacagtgcatcccggaaagaaattgatctttatgggatcagagtttgcccaatttgatgaatggaaagatacagaacagcttgattggtttttggactccttccccatgcatcagaaagccagcgtttttacgcaagatcttctccgcttttaccaaaaaagcaaaattctttatgagcatgaccatcgtgcacaatcgtttgaatggattgatgtccataatgacgaacaatcaatcttttcttttattcgttatggcaaaaagcacggtgaggcgcttgtcatcatttgtaattttacacccgtggtctatcatcaatatgatgttggagttcctttttttactcaatacattgaagtgcttaacagtgacagtgaaacatatggaggctcagggcaaatcaataaaaagccgttatcggccaaaaagggagcacttcatcataagccgtgttatatcacgatgaccatccccccttacggcatctcgattttacgggcggttaaaaaaagaggagagataaaaagatgaaaaaacaatgtgtagccatgctccttgccggcgggaagggcagccgtctcagcggattaacaaaaaatatggccaaaccggctgtatctttcgggggaaaatacaggattattgattttaccctaagcaactgttctaattcaggcatagacacagtcgggattttaacgcaatatcagccgcttgagctgaattcctatattgggatcggcagtgcatgggacctggatagatataatggcggcgtgacggttttacccccttatgccgagtcatcagaagtcaaatggtataaagggacggcaagcgccatttatgaaaatctcaattatttgaatcagtatgatcctgagtatgtactgattttatcaggagatcacatatacaaaatggactacggcaaaatgcttgattatcacattgaaaagaaagcagatgtgaccatctctgtcatcgaagtgggctgggaggaagcaagccggttcggcatcatgaaggccaatccagatgggacgatcacacattttgatgaaaagcccaaattccctaagagcaatcttgcctcaatgggaatttatatattcaattggccgcttttgaaacagtatcttgagatggacgatcaaaacccttattctagccacgacttcggcaaagacattattcctctgcttttggaggagaaaaagaagctttctgcttatccgttcaagggatattggaaggatgtcggaacggtgcagagcttgtgggaagccaatatggatttgttaaaagaggactcggagctgaagctgtttgaacgcaaatggaaaagttactccgtcaatccaaatcagcctccgcaatttatttcatctgatgcgcaggttcaagattcgcttgtgaacgaaggttgtgttgtatatggaaatgtgtctcactccgttctttttcaaggtgtgactgttggtaagcatgcgactgttacatcatccgtcataatgccggatgtgacgattggggagcatgtagtcattgaaaatgccattgttcctaatgggatggtgctgccggatggcgcagtgattcgctccgaaaaagacattgaagaggtgctgctcgtttcagaggaatttgtagaaaaagaattaatttaattactgaagagggggcagagtcagtgttcaataatcaaatgttaggtgttatagatgaaaccacatataagcattctcttcaggatttaacagcacagcggtcgctcggggcgatcccttttgccggcaggtaccgactgattgattttatgctttccaacatggtgaatgcggatattaggagtgttgcaatttttccgaagtatcgttaccgttcgctcatggatcaccttggggcgggtaaggaatgggatttgcaccggaaaaaggacggcctctttttttcccgtctccccatcttcatcacgaatacgatgaattcggttcctttcgccagttttcggaccatctagattacttccacagaagcactcagcaatatgctgtaatctccaacagccataccgtatgcaacattcaatttcaatatgtgctgaaacgccatcaggaggttggctgcgatgtcaccgaggtatttcaggacggccagtcgctgcaaatttatatcatgtctacaacacttttaaaagatttgatctacggacatagtgaaaaaggctataaaaccattcaggaggctgttgaaaaggaagcttccgctctgaccatttgcccttatgaatattcaggttatgccgcagttattgattcggtggaaaaatattatacccacagtatggaactcattcagccccgtttttggcagcaggtgtttttgccgcagcagcctatctacacaaaagtgaaggatgaaccgccgacgaaatacggaaaacacagcactgtcaaaaattctttggtggcaaacggctgtgtgcttgaaggagaggttgaaaactgcattttgttcagggcggtccatgtcggaaagggtacgaagctgaaaaactgtattattatgcaaaaaacgcagattggcgaggattgtcttcttgagcaggtcatttcggataaggacgttaaaatcggcaaggcgacggaagctgctggaacagctgaccagccgcttgtattaagaaaaggtttggtgcaaggagagctgatgaattcttgaagatattatttgctgtgtctgaatgcaccccatttgttaaatcaggaggtcttgccgatgtagcaggcgctcttccgaaggcgcttgcgcgattaggcaatgaagtatatgtgatgctgccgaagtacagccaaatacctgagccgtggaaaaagcgtatgaagaaaaaggctgagtgtaccgtagctgtcggctggcggcagcaatattgcggaattgaacatatggcagagaatgatgtgaattattacttcatcgacaatgagtactatttcaacagggattcgttgtacgggcattatgatgacggtgagcggtttgcctttttttcaagagctgtgctggaggctgccaaagttgtgaatgttcaagccgatattgttcatactcacgattggcatacagcgatggtcaattatttgctgaaagaggagtacagaaaacatcctttttatgaacggatgaaaagcgtgctcacgatccacaacctgcagtttcaaggcatattccctcctgatgtcacacatgacttgctgggtcttgagatggatcattttcattatgaaaggttagaatgcaacggatttgttaattttatgaaagcgggcatcattgcggctgatcatgtgacaactgtgagccccacttacagaaatgaaatcatgacgccgtattatggtgagcagttggaacaggttttgcaatatagggaagatgatgtaaccggcatattaaatggcattgatgatacgttctatcagccgaaaagcgacccttatatagaggcgcaatacgattcaggggatcttgcatgcaagctggaaaacaaaacgaagcttcagcagcggatggggcttccagagaaaaacgatattccgctgatcagtatggtgacaaggctcactaaacaaaaggggcttgatcttgtccgcagaattatgcacgaacttcttgaggagcaagacatacagctggttgtgctaggcacaggagaacgtgaatttgaagattatttccggtatgcagaatttgcttttcatgagaagtgccgggcttatatcgggtttgatgagccgctagcccatcaaatttatgcgggctctgatatgtttttgatgccgtcgaaatttgagccgtgcggtttggggcagctcattgctcttcaatatggcgccattccgattgtcagggaaacgggcggtctttacgacactgtccgtgcctatcaggaggaagagggaacgggcaatggctttacgttttccgcctttaatgcgcatgatctgaaatttacgatagaaagggcgctgtcgttttattgccaacaggatgtatggaagagcatcgtgaagaccgctatgaatgcagattacagctgggggaagtcggctaaagagtatcagcgtattttcgagcaggtgacaaggagtggacgggatgttctcgagtaaagaacgctttgcagacttatttttaaagcgtctggaaatgacgtgcggaaaaagctttaaagattctgccaagctggatcaatataaaacgttgggcaatatggtcagagagtatatcagcgctgattggatcgaaacgaatgaaaaaagcagatcaaattccgggaagcagacatattatttatcaatcgaatttctgctcggtcagctccttgagcaaaacttaatgaatcttggtgttcgtgatgttgtagaagctggtttaaaggaaatcggcatcaatttagaggagatccttcagatagagaacgatgcaggtctcggcaatggcggacttgggcgcttggccgcttgctttttagattcgcttgcttcgttgaacctgcctgggcacggcatgggcatacgttataagcatggtttgtttgagcaaaaaattgtagacggacatcaggtggagctgcctgagcaatggctgaaaaacgggaacgtatgggaagtaaggaatgcggatcaagcagtggacgtgccgttttggggcgaagtccatatgacagaaaaaagcgggcgcctgcattttcgccatgaacaagcgacaattgttaccgctgttccttatgatatcccgatcatcggctatgaaacgggcactgtcaacacgttaaggctttggaacgccgagccctatgcccattatcacggcggtaatattttgtcttataagcgagaaacagaagcggtttctgaattcttatatcccgatgacacccatgatgaggggaaaattttacggctgaagcagcagtattttttagtatgcgcaagcttaaaaagcattgtgaacaattaccgtaaaacacataaatctttatccggcctgcataaaaaagtgagcattcatattaatgacactcaccctgcgcttgcggttcctgagctaatgcggattttgctcgatgaagagaacatgagctgggaagaagcttggcatatcactgtacatacgatttcttatacaaatcatacaacattgtcagaagcgctcgagaaatggccgattcatttgtttaagccgctgctcccgcgaatgtacatgattattgaagagatcaatgagaggttttgccgtgcagtttgggaaaagtatcctggagactggaaaaggatagagaacatggcgattacagcgcatggtgttgtcaaaatggctcatctggccatagtaggcagctacagtgtaaatggcgttgcaaaaatacattccgatatattaaaggaaagggagatgcgcgactttcacttgctgtttccgaatcgttttaacaataagacgaatggaattgcccacaggcgctggctgttaaaagcgaatccaggcttgtctgccatcattacagaggcgatcggcgatgaatgggtcaagcagccggaatcactgatccgtttagaaccgtacgccactgatcctgcatttattgaacagtttcaaaacaacaaaagcaagaaaaaacaagagcttgccgatttgattttttgcacggccggggtggttgtgaaccctgagagcatattcgacgtacaggtgaaacggcttcatgcatataaacggcagctgctgaatgttcttcacattatgtatttgtataaccgcctcaaggaggattcggggttttcaatctacccgcaaacctttattttcggggcaaaggcttcaccaagctattattatgccaagaaaatcattaagctgatccattctgtcgcagaaaaagtcaattatgatccggcggtcaaacagttgatcaaagttgtttttttagaaaattatagagtttctatggctgagcgaatttttccggcatcagacgtaagtgagcaaatttcaaccgcaagcaaggaagcgtctggtacagggaatatgaagtttatgatgaacggggctttgacgatcggcacgcatgacggcgcaaatatcgagatccttgagcgggtgggccctgactgtatttacacgttcggcttaaaggcggatgaggttctatcgtatcaggaaaacggcggctataggtcgagggaatattatcagcatgacaggagaatcaggcaggtagcggatcagttgatcaatggtttttttgaaggagaggcagatgaatttgaatcgatctttgactcgctgcttccgcataatgatgagtattttgtgctgaaggatttcagctcatatgcagatgcacaggagcgaattcaagctgattatcgagagcgaaggaaatggtctgagcattcgattgtaaacattgctcattctggatatttctccagcgaccgcacgatccgggaatatgcgaaggacatttggggcatcaagccgatgatgtgaaaaagccgctgtataagcggctttttttgttcacagattcattgaattgattgtaaaggataagaacgtcgcaaatgcactccataaaaaataaggcaaaagaagatagcttgcggctctgctgtattttttggcaatgatcagtaatacgattgctgtgatggcgacaagcaggcagtcaagcgatgcagccagcagatttttttgcgtaaactggaaatagctgaaggcttgattgagcacgtaatttatcaaaagtgtaaaccaaaagcttttcgcacctttaaatgaaaacgcagcatatacaatggctgctgaaagggagatcagggcaaacaggatggcccaaatgatgccgatcgcagttccgcttggcgtccagtccggttttttcaatgaattgtaccattcttggtccacaggaaacaggtagcctgcggctgaaaacagcgcatatgtaatcacaaaaacggctaaagcgccgacaatctttttcatatttgcaacctccgcatgtatttaattaccctttatcttataaatatcaaacccccgatatgcgggggaaatgatggtcttaaataagctgccgcaatgcgtttgctttaatgcgttcatattcaaaagctgattctaattcttccttcggtaaagcagacttgcggacgtatttttcgcgaatgacatcgtaaagctcgtaaggaaacagcatatcaataaacatgacttgtttttgttcttcagttaatggggctctggattcgtatgcgttcagcatgacatgaaatgtttcttcatcccaaacgcccgtcgtatccaaaagcggaataatcattttgcgcaaatcgcgaataggcagatcaaatgaaacggtatctaagtcaatgacccaaatctgttcattttcccctaagagtgtatttccggttccgtaatcctggtggcaaaggttagggctttttttcagctgttcagtccatggaacataggccgactgcaaaagccggtctttgatgcgcagcccgtcttcaataaagccatctatctcctgaagataaaactgtgagaaaggatcttctttttccgcctccgccatcagcttccacgtttccatctgtttgcatcgtttcgtgtagtgattcggccagcgacctaatttggtaaatacgggaacgccatttggcggctgatatccgacggaagctgtatgaaaatcagcaaggcctttcatgataaactccaagtcctgctttacagtcagctcaaacggccttccttcgatccagtcatatacgacaaatagaaatgagccgtgcttggaatataggctgccttttttgtttgggagtatgccaggaacattcatgcctttttttgctaaatagtcctgcgcgaaaatggaaaataacgctttcttttctggcctgtgtattcgttttagacaaaccgcgccggagtctgtgtggaccttccagacaagcgccatctgatttccttgaatgacgtctattttttcagcctgcacatcccatccttgaagcacattttcagccagctccgttaatttttttgcatcttctgctgataaaggaagctctgatgaattcccctcctcaatgacttcatggttttctgccattaaaggacacatccttacctgttttactcctaccttatgaatcaaaaggaaaaaatgattgagttatttgactatatttaatagatgaatctggttgtttacccgttttgtttttagggcagtcccattccgcacaagttggttgttcagccgtatcatgattctaactagttaaaaatcatgcaggaatggaggctatgtatgaaaatagcactgatcgccacagagaagcttcctgtcccatcggttcgaggaggcgccattcaaatctacctcgaagcggttgcccctttaattgccaaaaaacatgaggtgactgtgttttctattaaagatccgaatctcgctgatagagagaaggtagacggtgtccattatgtgcatttggatgaagaccgttatgaagaagccgttggagcagagctgaaaaagagccgttttgatcttgtgcatgtttgtaatcgcccaagctgggttccgaaattgaagaaacaggcgccgggtgctgtttttattttaagcgttcacaatgaaatgttcgcttacgataaaatcagccagacagaaggcgagatttgcatcgactccgtagcgcagattgttacggtcagcgattatatcggacagacgatcacaagccgttttccgtcagcacgatcaaaaacgaaaacggtgtattccggtgtggatttaaaaacgtaccaccctcgctggacgaatgaagggcagcgagctcgcgaagagatgcgaagcgagctggggcttcacggcaaaaaaatcgtcttgtttgtcggccggcttagcaaagtcaaaggcccgcacatattattgcaggctttgccggacatcattgaggagcaccccgatgtcatgatggtgtttatcgggtcaaaatggttcggagataatgaattaaataactatgtcaaacatcttcatacccttggtgcgatgcaaaaggatcatgtcacatttattcaatttgtgaagccaaaggacattccgcgcctttataccatgtcagatgtatttgtatgctcttcgcaatggcaggagcctttagcaagggtgcattatgaagcgatggctgcgggacttcctattattacaagcaatcggggaggcaatccagaggtcatagaggaagggaaaaacggctacatcattcatgactttgaaaatcctaaacaatatgccgaacgtatcaatgatttgctgagcagctcggaaaagcgggaacggcttgggaaatacagccgccgtgaggcagaaagcaattttggctggcagagggtggctgaaaatctgctcagcgtctatgaaaagaacagatagaaggggtgaacagagtgtaccaaaaagagcatgaagaacagattgtgtccgaaattctcagttattatccgtttcatatcgaccatgtggcgctgaaatcgaacaaaagcgggcgcaaaatctgggaagtcgaaactgatcatggtccaaagctgctaaaagaagcgcaaatgaaaccggagcggatgctttttatcactcaggcacacgcccatttacaagagaaagggctgccgatagcgccgattcatcaaacaaaaaatggcggtagctgcttgggcacggatcaggtttcttacagcttatatgacaaagtgacaggaaaagaaatgatttactatgatgcagagcaaatgaaaaaagtcatgtcatttgccggccattttcatcatgcctcaaaaggatatgtttgcacagatgaaagcaagaagagaagcaggctgggaaaatggcataaattgtaccgatggaagctgcaggaacttgaagggaatatgcagatcgcggcatcctatcctgatgacgtattttcgcaaactttcttaaaacatgctgataaaatgctggcaagaggaaaagaagctctcagagcgcttgatgactcagaatacgaaacctggacaaaagagacgctcgagcatggcggattctgttttcaggattttacattggcacgtttgactgagatcgaaggggagccttttttaaaggagcttcactcgattacctacgatttgccgtcaagagaccttcgtattctgctgaataaagtgatggttaagctttctgtatgggatactgatttcatggttgcactgcttgcggcctacgacgcagtgtatccgctcacagaaaaacagtacgaggtactttggattgatctcgcgtttccgcatttgttctgtgcaatcgggcacaaatattatttgaagcaaaagaaaacgtggtcagatgagaagtataactgggcgctgcaaaacatgatttctgttgaagaatctaaagattcgtttttggataaactgccggaactgtataaaaagataaaagcgtatcgggaggcgaattgacatgaggtcatcgagacaaaaagcctctatttctaaactggatctcgaccaattcgtatttacaccgcctggaccgatgggatggcaggctcatgactcaatctcagctgagaaggaagaagaggagaagcatttagatgtgggcagcattcgagagctccctcacatcaatgcaccgaaagaatatcaaaaagaaacgaaggaaaaggaaacagatcgcaaaatcgtcgatgatgaagaagaaacaaaattcgaaaccactctggagcctgaggaggagcgtgattcgaaacgctcagcgcccccatatgaagaagaggatgaagatgaagaaccagacttagcggaagaagctaaagtggaaatcatcattcttccaagtgaatctaaaccagctccatggttttctcaaactgtaaagcgcaaggcataaagtcacatttatgcctttttttaagttctctgtagcgaaaaaacagcccgttttgcaacacgagctgtaggttttatgtttttgctttcacaaaaagctgattgatagatgataaatcaaaattttgcgtcagaaaaggcggcggaaattgtttgtttttcggggtcagaacggattggtaaacagtattgagccttttggcagcatgggtaaaggtaaataaagcttctacatgctttcgggcgttttttgtcattttgttcattaattcttgatctgtaaaggctctgtcaattgcttttgcaaatgaagaaggtttgttgtagctatcgatgacaaggccggtgacttcgtgttttacgacttcaccgtttccgccccggtttgtggtaattaagggcgtgccggccgccattgcttcataattcacacgggcgaggggttcgttccactgagagctgcacacaaatacatctgccatcagaaaaaggtttgggatatcgtctgcgggaatgaattttgtaaagattatgtggtctctgtatggcagcgccagcgtgcgcagataggtgacatattggttttcgctgtcatcgctgaaccacttcccgcctgctatgaccagtacagcatcagggtgctgctgcaaaatccgtctcatgctgtgaatgagaaggtgaggcccttttgtcgggcttaagcggccggcgaataaaataacttttttatcttcaataccgtattttttccggtatgtttttctgacagccgagcctttcatcgtccagacgggcggataagagtttaaatcaacgccggaatacacaacttttgtgatgtcctcggcttcagggaaacgttcaatgacggtttgtttaataaattcgctcactgttgtgatcatggagacattgtcgagtacttcttttccttgcgcgaaggtcatctttttttcagaaaacatttcgttatgcaggctcagaacgatcttgctgtttggtgaggcttttttatataaagagacatttaaaggcctgttgaacacatgaatgaggtcaaaggaagaggctcgcagctcttcggctaccgcctcgcggtaatgttcttttggcagatggatataatgtacgccgtcttttgtttctctttttgggagcgatggatcttctattgaaaaaatggtcaggtcgtacctgctgctgaaatagggcgtgacaccgtcaatcatcatttgaatagcgccgccgcgtactgcgggcgccggcagcttttctgtacagataaaggcaagcttcatttttattccccctgatacagcgacgataaataggcgatttcgttggtcaagccatcctttaaggatgtggcgggatcataatgcaagagctgttttgcttttgaaatatccgcccacgtgttgctcggttcccctgctattttgtccgaaaagtgcagtgttgcttttctcccggaaatatcctcaatgagggagacaacttttaagactgaggcacgctctgcgccgccgatatttactgtttcaccaataaggtggggtttcccaagaacagcggtgatgcctttgacacagtcgctgatataagtgaaatctcttgactgctgcccatcaccgaagatggtaagcggcttttgctgaaggtgctgcttaatgagccggtgaaaagccatatccggccgctgtcttggcccgtatacggtaaaaaaacggagaatcacaattggaatgccaaagctctgtttatacacatggcaaagcttttctcccgtaagctttgttaccccgtacggagataaaggagaaagcgacgtgttttcgctgacttttccttgtttttcgccatagacggaagaggtggatgcaaagacgaacgtttgaatagaatgttcccggcacgcctcgaggagcctttggagcgcttggatattatgtgcggcatatgggtgaaaatgattgccccagcttgagcggacacccggtatggccgccaaatgaaagatgacgtccactccttccagtaagggagcaagatcggctgtcagcagattttcctttatgaacgtaaatcgcttttccggcagcaggtttttaaggttttttaatttcaaggaaaatggagtaggaccgataaagtcatcgattccgataacgttatgtttcttatcttttagtaattcttcgcagaggtgggagccgataaagcccgctgctcctgtgacgagtattttcatggacggccaactcccgtacagatcaggccgcaagcctcgatcagttctttttttagtacgttgcgtccgtcaatcacaagacgccctttcatgatatctgcagcctttttccaatcaaacgctaaaaactcagaccattctgtcgccaaaaataaaaagtcactctcttcgatcgcatcaaaagcttgagaatgctgagttacatgttgccgcaaatgttctggaagtacagcttcaggatcatatgcatgaacatcacatcccagctccgccagcctttccatcagtctgacagcctgagaattccggatgtcatcagtattcggtttgaaggaaatgccgagtacagccgctttcttgccttgaagtgtttcgaagaatgactgtatttttttgatatacaggccaagctgggtgtcattaatgtgctgcacggcccggagcaggaaggtctccgtgtttttttcctgggcagcaaattgcagcgcctgcagatcctttggaaaacaagagcctccgtatccgatgcctgcctgcaaaaagtgcttcccgatccttgggtctagaccgatagcgcgggaaatatctgagatatctgattgataggcttcacatatgcgggccatttcgttaatgaacgaaattttggccgctaaaaagaaattgttggcatatttgatcagctctgctcccgctaagcttgtaacgataaaaggggtatcaatgtgtttgtaaatggatttgacgatggctgccgatacgtgatcttcttcctgaacaccgatgactgttttgtcaggatgcagcatgtcatataaggcattgccttcccgcagaaactccggattggatacgatattaaagaggtttttagacactccggaggcaatcagctgttttgctatgttttcatttgtcccgggcggaacagtgcttttcgtaataatggttttatacgatcggatcgcctcgcttaaatcaccgatgacggactgcagggctttcgtatcagctgatccgtccgaacgcggcggagttccgactgcgataaaaataacgggacattcctccatgctcgatttcacttcagaagaaaacgagagattgccgcaacgaagtattgcatctgaaagcccaggctcgtaaaagggaatgactccttttttcagctgcccgatttttttgacgtctttgtctgtgcatatcatgtcatgtccgatggatgccagtgccgctgatagggttaaaccgacatacccggcgccaaccacacaaattttcatcacctgagctcctttacaagattactggtcatatatcaatatcctattaaaaaagggctggttcgtgattccgctttctgcccagttgcttccgcctaatttcagatgtacaaacatcgggatgcgctcttggaatatcatgtaataaacatgagctgaggggaaaataccatgataaaaaaagcgatcattcctgcaggcggattcggcacgagaaatctgccggtgacgaaggtgattccgaaagaaatgtttccggtaggatctaagcctgtgattcattatcttgttgaagaattaaaggagtcaggcattgaggacattttgatggttgtatcgagccataaaaatctgattgttgactattttgattcctctttggcacttgaggcttttttggcctctaagaataaactgcatttacttagagagcatcccattccggatatacggattcactatgtgcggcagccttatgcaaagggtcttggcgacgccatttctttcggaaagcaatttgcaggaggagagccttttgccgtcgttttgccagatgatctgattttttccgccaatcagccggctttggggcagctgattgaagcgtatacgaaatatcagtccagtgtgatcggcttaaaagaaacaaaaacggaggatttacatcattacggggtgataaaaggggagcctgttgaaaaagggctttatcgcatacaggatattgtggaaaagcctaaacaaaaccctccgtctcattttgccgcagcagggcgttatattttcacaccggatatttttaatgagctggaggcattagaagctgatagcggaggagaagtgcaggtaacggatgcgataaaagcttcgctcggggcatgtaccgtatacgggaaattgctagagggcgagcggtatgacatcggcctgcaaaaggattatctgaagctgatttacgatatgctgaaaacggaaaagaacccccaataattgggggttcaatcagcgtggagatcgccgaatgtggtcatgattccctcttcgtcaagttcttcttcatagcgctcatgggctctgctttgataaacggtaatttctttcccagtgatatctgtagcgatgaaattttcgtaagactccgtattgccgatattctcttcggcattcatcgtcatatcatcatagctgagcggagggttttccatatcctgcggcgtttgtgagttcccatatttttcgacatcctgataggaatcctcactgtcatatggcgctctgatttcttcatcatcatcaaattcaaattgcccgaatggtgtttcttcttcaatcggacggtctttggaaaccacgtcctgtgacgaatactccgcgagggttgtggcagtcggaagcgcttcaagtcgttcgaaagggatttcctttccgctgacttcacaaatgccatacgtaccgttttctatcgccttcaatgaatgctcaatgtcccgaaggtgctctctctcatgcaagtctagagcgatgtctttctcacgctcgtaaagttctgtcgcctgatcgccgggatggttgtcgtatgccgaaagctcaccccacgaatcataaggaaaggctgagttaagctgaaaatgatcattgtctttgaaacggtttaagatatcttttttcgtttgttccagttcattttttaaatgctgaagctgttctttcgtaagcaatgtgatcgcctcgtttctctgtgatgcatacctttagtatgaacagatcgcctgagaactttcataaatggcgggtggaggaatataggaggttttccttttatggtaagcggatacaacctttgctatcagtggagaaagaaatttaagctttgtttctttttcatttctgaaattaggtttataataggtaaggcaggccatttggactgcatgatctgtgtttgacacaaaggagacacaggtgtatggtattaaaagcattttaaggattatggaggaatgtctcatggtgacaacggtgcagcgtacgttccgaaaggaagttctacatgcattacataaagccaaagaagtcaaccatgctgtcttaataagctattcgagacaaatcgagtctcttgaccctctatcatttttcaattacggagcaaaaaaatatacaggcaatcgatttttttggtcagatcctgaaagtgaattgacaatagtcggtcttggcaaagaagcggttttccagacaaatcaaaaaaacagcgagcggtatcgtgaggtttttgaacaatgggagcgctttaaaaagacggcttttcatatttatgaagaagaaaagctgcagcattctgcagtgggacctgtgttattcggaggattttcttttgacccttgcgaagaaagaggttcacaatgggaccatttctcggaaggggatttctttgtgcctgcgcttatgctgacgatgactgctgaaggcccgttcttaacagttaacagatgggtaagcggaggagaagacgcagaagctgttttagaaggcttaaaagcttttgcggcggaatttatggttcccgatttcaagcaagaagatcaggctgtgattgcagcagccgaagagctggataaggatgattggctgaaagcaatcgaaacggccacaagccaaattaaagagaaacaatatgataaggttgttcttgcccgagagctgctgctcacgtttgacggtccaatccaaattgaaccggtgcttaaaacgcttctggacgatcagcagacaagctatgtttttgcaattgaacaagaaggcaaaacctttgtcggcgcgtctccggaaagactgatcaaaagagacggcggcactgtcatgtcttcctgtctggcaggctccattaaacgaggcgtgaatgaagaagacgaccgccggataggccttgaattattaaacgatgagaaaaacctgcttgagcatgatattgtggtaggtatgattcataatgcttttgtatcaagctgttcagaggttgaaaagcctgatggacctgttttgtacaaaacaaaaagcgttcagcacctgtttacgccgattgtcggacagctgcgcgagtctgcttcgatttttgacttaattgagaagctgcaccccactcccgcgcttgggggatcacctcaggaaaaagctgttgacgtgatcagggagattgaaccgatgtcccgcggctggtatgcggcccctatcggctggattgacagccaggataacggggaattcgcggtcgccattcgttcagggctcatcgaaggaagcacagcaaggctgtttgccgggtgcggtattgtggaagactcggaaccaatctcggaatatgaagaaacacagattaaattgaagccgatgatctctgcattaggaggtgagaggcgttgacagtcaacccgattactcattacatcggaagttttattgatgaattcgccctttccggaattacggacgccgtcgtttgtccgggctcaagatctacaccgctggctgttctttgtgctgcgcatcccgatatcagcgtccatgtccaaattgatgaaaggtctgccggattttttgcattaggtttggcaaaagcgaagcagcgtcccgtactattgatctgtacatctggaacagccgcggccaacttttatccggctgtggttgaagcccattattcaagggtgcctattattgtgttaactgctgatcggcctcatgagctgcgcgaagtaggcgcaccgcaggctattaatcagcacttcttattcggtaactttgttaagtttttcacagactctgctcttcctgaagagtctccgcaaatgctgagatacatccgaacgctggcaagccgcgctgccggagaagcacaaaagcgcccgatggggcctgtccatgtgaatgtgccgctgcgcgaaccgctgatgccggatctttcagatgagccgtttggaagaatgagaacaggccgtcatgtgtctgtgaaaacgggtacgcagtctgttgaccgagagtccctgtctgatgtggctgagatgctcgcagaggctgaaaaaggaatgatcgtctgcggagagctccatagtgatgcggacaaggaaaacattattgcgctgtcaaaagcgcttcagtatccaattttagcagatccgctgtctaatctgcggaatggtgttcatgataaaagcactgttattgatgcgtatgattcgtttttaaaagatgatgagctgaagcggaaactccgtcctgatgttgtcattcggtttggaccgatgcctgtttcaaaaccggttttcttatggcttaaggatgatccgacgattcagcaaatcgtgattgacgaggatggagggtggagagacccgacacaggcaagcgcgcatatgattcattgtaatgcgtctgtttttgctgaggagatcatggcaggccttactgctgccaccagatcctcagagtggctggaaaagtggcagtttgtcaatgggcggttccgcgagcatctgcaaacaatcagcagtgaagatgtttcgtttgaaggcaatctctatcgaatccttcagcatcttgtgcctgaaaacagctcgctgtttgtgggaaacagcatgccgatcagggatgttgatacgttttttgaaaagcaggaccgccctttccggatttattcaaaccggggagcaaacgggatagacggtgtcgtctcctctgccatgggggtatgtgaaggaacaaaagcgcctgttacccttgtgattggagatttatctttttatcatgatttaaacggcctgctggcggccaaaaagctgggtattcctcttactgtgattcttgtcaataatgacggaggagggattttctcctttttgccgcaggcttctgagaagacacactttgaagatttgttcggcacaccgacagggctcgatttcaagcatgcggctgcactttacggcggaacgtattcatgcccggcttcttgggatgaattcaaaacagcttacgcgccgcaggcagacaagcccggactccatttgattgaaatcaaaacggatcgccaatcaagagtccagcttcatcgcgatatgctgaatgaggctgtgcgggaagtgaaaaaacaatgggaactgtaaacataacggtatcagatggtgtccgatatgcagtggcagacgagggaccgaatgcttccgaagccgtcgtctgtctgcatgggtttaccggcagcaaacaatcatggacttttcttgatgaaatgctgcctgattcccgtttgatcaaaattgattgtttagggcatggggaaaccgatgccccgctgaatgggaaaagatacagcacaacccggcaagtttctgaccttgccgagatttttgatcaattaaaacttcacaaagtgaaattgattgggtattctatgggaggaaggcttgcttactcttttgcgatgacatatcccgagcgggtatcggcacttgtgcttgaaagcacgacgccggggctcaaaacacttggggaacggcgggaacgaatcatgcgggaccggaagcttgctgattttattttacgagacgggctcgaagcgtttgttgcgtattgggagaatatccctttgttttcatctcagcagaggctggctgaagatattcggtacaggatacgatcgggccgtctgcggaacaataagattgggcttgcgaacagtttaaccggcatgggcaccggttcacagccttccttgtggagccgtgtagaggaaatagatgttcctgtgcttctgatctgcggggagtgggacgaaaaattttgcgccatcaatcaagaggtgcataagatgcttccttctagtagaatagagattgttccaaaagcaggacatacggtccatgtggagcagccgcgattgtttggtaaaatagtgagtgagtttttgacaagcatctgactcattcacatagagaataaaaggaggtcatcatatggctgaatggaaaacaaaacggacatacgatgagatattgtatgaaacgtataatggcattgcaaaaataacaatcaaccgacctgaggtacataatgcgtttacccctaaaacggttgctgaaatgattgatgcgtttgctgacgcaagagacgaccaaaacgttggggttatcgtgcttgccggtgcaggggacaaagcattttgttctggcggagaccaaaaagtgcgcggccacggtggatatgtaggagacgaccagatccctcgtcttaacgtattggatcttcagcgtttaatccgcgtcatcccgaaaccggttgttgcgatggtgtccggatatgcgatcggcggaggccatgtgcttcacatcgtatgtgacttgacaattgctgcggacaacgcaatttttggacaaacaggccctaaagtgggaagcttcgatgcaggttacggttctggctacctggctcgaattgtaggacataaaaaagcacgtgaaatctggtacctatgccgtcagtacaacgcacaggaagcactggacatgggtcttgtcaacacagtcgttcctttggaacagcttgaagaagaaacgattaaatggtgtgaagaaatgcttgaaaaaagcccgaccgcactgcgctttcttaaagctgcgtttaacgcggacacagacggacttgctggaattcagcagtttgcaggggatgctacccttctttactacacaacagatgaagcaaaagaaggccgtgattcctttaaggaaaaacgcaaacctgatttcggacagttccctcgttttccgtgatcagcaatatctagtaaaccaacagcttgagactttgcggtccaagctgttttcttttcaatacagacattttacctcggagatgatgacatgctgacagaacagcccaactggctcatgcagcgggcacagctgacacctgagagaatcgctctcatctatgaagaccaaaccgtgacatttgcagaattgtttgccgcgtctaaacgaatggcggaacagcttgccgctcattcggttcggaaaggggatactgcagctattttgctccaaaaccgtgcagaaatggtatacgctgttcacgcttgttttttgcttggtgttaaggcggtgcttttgaatacgaagctgtcaacacatgaaaggctgtttcagctggaggattcgggatccggctttttattgacagattcaagctttgagaagaaagaatatgaacacatcgttcaaacgattgatgtggatgaactgatgaaagaagcagcagaggaaattgagatcgaggcttatatgcaaatggatgcaacggcaacgctgatgtatacgtcgggtacgacaggaaagcccaagggagttcagcaaacgttcggaaaccattatttcagtgcggtgtcgtccgctcttaatttgggtataacagaacaagaccgctggcttatcgcattgccgctctttcatatcagcggattgtccgcattatttaaatctgtgatctatggaatgactgtcgtgcttcaccagcgtttttccgtaagcgatgtgctgcattctatcaacaggcatgaagtgacaatgatatctgcggtgcagactatgctggccagtcttttggaagaaacaaaccgctgccctgaatccatcagatgcattcttctcggcggcggtcctgcaccgctgccattgcttgaggaatgccgtgagaaaggattccctgtctttcagtcatatggaatgacagaaacatgctcgcaaattgttaccctgtcgccggaattcagcatggaaaagctcggatctgcggggaaaccgctgttttcgtgtgaaatcaaaatagagcgggacggacaggtatgtgaaccgtatgaacacggtgaaatcatggtcaaaggcccgaatgtcatgaaaagctattttaaccgggagagcgcaaacgaagcctcctttcaaaatggctggctgaaaacaggtgatcttggttatttggacaatgaaggctttttatatgtattagacagacgttcagatctgattatatccggcggagaaaacatttatccggccgaagtggagtcagtgctgctttcacaccccgctgtggccgaagccggggtttcaggggctgaggacaaaaaatgggggaaagtgcctcacgcctatcttgtccttcacaagcctgtgagcgcaggagaattgactgactactgcaaagaacgcttggcgaagtataaaattccggcaaaattctttgtgcttgaccgcctgccgcgcaatgcgtctaataagctcttgcgaaatcagctgaaggatgcgcgtaaaggagaactgctatgatcgaaatagaaaaaatcacgctttaccatttgagcatgaacttaaagaaaccgtttaaaaacagtatcgaaacgcttcaagagcgtaaatttctgatcgtggaagccattgatacatcaggtgtcacaggctggggagaagtttccgctttctcttcgccttggtacaccgaggaaaccattggaacatgtttgcatatgctaaaagatttttttatcccaaatgtcgtcggccgtgaattcaatcacccttcagaagtgccggacagcctggcgcggtataaaggaaaccggatggcaaaagcgggacttgaatcggctgtatgggatatttatgccaaaaagaagggcgtatcccttgctgaggcattgggcggaacaagagataaagtccctgccggggtggtagtcggcctggcgcctcttgacgatatgctgaaggaaattgagagctatcaaaaagaaggttatcaaagaataaaaattaaaattcagcctgggcaggatgtggaattggtcaaggccatccgcagccgattcccaaacatcccgcttatggccgatgccaattcctcttacgaactgaaggatatcagccgtttaaaggagcttgatgactatcatttaatgatgattgagcagccgctccaagctgacgatatcgttgaccaccgccacttgcagaaacatttgaaaacggccatttgccttgatgagagcatttgttcagttgatgatgcgagacgggcgattgagctaggaagctgcaaaattattaatataaaaccttctcgtgtcggcggcttaacagaagccttaaaaattcatgatttatgcaaagagcatcatatgcaggtttggtgcggaggaatgctggaaacaggcatatcaagagcgcagaacgtggcgcttgcttcactgcctcaattcacaatacctggcgatatatcttcatcctcacgctattgggatgaagatattgtaactcctgatattcgtattgataatggatttatttctgtgtcaaaacagcctggtttaggggttgaggtaaaccaagatattatgcgaaaatatgtgaccaaaatggatgttttcacacagcatggttaagaaaaaagcattttgctattttgaataaatgacactgtgctgttacagtaaaagtgttcgttgaatacatcccttctcgtttggaccggctgctgacccagccggtttttttatgtaaatcagcttgacaaaaatggccaaacgcgataattttgcatgagggaaactttttgtcctgtgtaaataaaacatgcttttggctaatttaatgtcacatgtctaagaactgacaacataagataaaacaatcggacattgatggcaaagaggaggagaaatatgagacaagggctgatggcagcagtactttttgcgacctttgctttaacgggatgcggaacggattcagccggaaaaagcgctgatcagcaattacaagtgacagcgacaacatctcaaattgccgatgcagcagaaaacatcggaggtaagcatgtaaaagtcacctctttaatgggaccgggggttgatccgcacctttacaaagcttcccaaggtgacacgaaaaaattaatgtctgccgatgttgttctgtacagcgggttgcatttggaagggaaaatggaggatgtcctccaaaaaatcggcgaacaaaaacaatcggcggcagtagctgaggccattccgaaaaataagcttattcccgcgggggaaggcaagacgtttgatccccacgtctggttcagcattccgttatggatctatgcggtggatgaaattgaagcgcaattcagcaaagcaatgcctcagcacgcagatgcctttcggaaaaatgccaaagagtacaaagaagatttgcaatatttagataagtggtcgcgtaaggagatcgcacatattccggagaaaagccgtgtgcttgtgactgctcatgatgcgtttgcgtactttgggaatgagtatggatttaaggtaaaaggcctgcagggactcagcacagattcggactatggattaagggatgttcaggagctggttgatcttctgacagaaaaacaaataaaagctgtgttcgtagaaagcagtgtatctgaaaaatcaatcaatgcagtggtggaaggcgctaaagaaaaaggccatacagtcacaatcggcggtcagctttattcggatgccatgggtgaaaagggcacaaaagaaggcacatacgaaggaatgttccgccacaatatcaacacgattactaaagcgcttaaataaagaaaagaggtggaggatatgttccctgttgagcttgataatgtgacggttgcttatcataaaaagcctgtactgcaggacatttcgctgcaggtgcctgaaggaaaacttattggcattatcggcccaaacggcgcgggaaaatcaaccttgatcaaaacgattctcggtcttgtgcccagagcttccggagacatctctatttacggcaaagactataaggatcagcggaccagaatcggatatgttccgcagcgcggctcggttgactgggatttccccacaagcccgctcgatgtcgtcctaatgggaagatatgggagaatcggtttattaaagaggccaaagaaagcggatgtggagatggcgaaggccgcattaacaaaagtcgggatgcatgattatgcgaaaaggcaaatcagccagctgtcaggcggacagcagcagcgggtgtttcttgcccgggcactctgccagaacgctgacatttattttatggatgaaccgtttgcaggtgttgatgcagcgacggagcgcgcgattatgacgctgttggcagaactcaaagaaaaaggaaaaaccgtgcttgtcgtccatcatgatctgcagaccgccgaggattatttcgattggatcttactgcttcatttaaggaaaatcgctttcggaccgacggaaaacgtttttacgatcgaaaacctgcaaaaaacatatggaggaaggcttacgtttttaaaagataaagtgctggcagaaggacataaggagtgagcgcaatgtttgaaagtttgtggctgcagcttcagcatccgaatacacagtgggtgctggccggtacgcttttgctcgggacggcaagcggtgttttgggcagctttgtgctgctgagaaagcaaagtttaatcggcgatgcgatggcccattcagctctgccgggagtgtgtctcgcttttctgttcaccgggcaaaaatcactgcctttctttttgctgggggcagcgctcgccggactgctcggaacgttttgtattcagctgattcctcggctttcaaaaacaaaggaggactcggcgatcgggattgttctttctgtgttttttggcgtcgggatcattctgctgacatatattcagcaacagggggcgggaagccaaagcgggcttgattcttttttattcggccaggctgcttcattggtcaggcaggatatcatccttattgcagggatatccgctgttctactgctcctatgtattgttttctttaaggaatttacattgattacttttgatctcgcgtttgcaaagggattaggaatcccggtgcgttttttaaacgggcttttggcttgtctgattgtctgtgctgtcgtcattgggcttcagactgttggtgtgatattaatggcggctatgctgattacacctgccataaccgcgagatattggaccgaacggttaaccgggatgatcgtcattgccgggattacaggcggggtcagcggcgcggccggaaccctgcttagcaccacgatgaagggaatggcgacagggccattaatgatcttatctgcaacgctgctctttcttgtttcaatgatttgcgcgcctaagcggggattggctgctaaagccataaggctgatgaggctgcggcgcagaacaagcagggagcaagtgcttttggcgatttatgaacagtatgaaaagaataatctttgtgtaactgttgaaagtgtaagaaagaaaagacgcctatccccttcattatgccttaaggcattaaatgacttggaacaagagaggtgcattgagcgtatcgaaaatgggatttggcaaatcacaagcaaagggatagaaaaaggctatcacacagctttgaagcagcggatgtatgaagtgtatctcatgcatgaaatggaacttgccaatatagaatccgatcaggactactttgacccggaccgtttaccgagagaaacgagagagcggctttattcactcttaaagctgtatggacggatgcctgagcttcgaaaagtgtctcatgatgccgagaagggacagatcgcgaatgagttttgaagcatggattatagctaccggtgtattagtcggtgtaagctgcggattgatcggcacatttcttgtactgagaagcatggcgatgctggccgacgcaatcagtcatacagtgttgcttggcattgtcggcgcttttctagtgacgggaagtctcgatgggatttatatgtttattggcgcagccgcaaccggtctgttaacggctttcttggttcagcttcttcatagcaagggggttcaatcagatgctgccataggagttgtgtttacatccttatttgcaatcggggttattttgctttctgtgtatggagcgaatgtccatctcgatattgagcactcgttaatgggagaaatcgcttttgtgccgtggaatacggtgacggtattcggggttgatattgggccgaaagcgttttggatgctggcatctgttctggttttaaacgtagtgttgatcagtgtgtgctataaggagtttaaaatcgcttcgtttgatcctcaaatggctttagccttgggaataccggttttgctcattcattacgtgcaaatgggcatgctgtccttgacgactgttgcttcctttgattcggtgggtgccgtattggttgtggccatgctgattgttccgccggctgcggcacatttgctgacagaccggcttctttatatgctgattctcagcgcgttgattggcgggctgtcggcggtcatgggctatttcttcgcaacgtggcttaatgtttcgatttcaggagcgatggcggccatgacaggtgtatgttatgcaagcgcctttttgttttcacctgcaaacggggtcataactaaaaagctgagaacactcaacatgcaaaaagaaagagctggctgatgcagctctttcttttaattacaaatcatgcggcttaaacgttttgcagtctgtttcccggctgttttcagccgtttcaccagtatggctgacaacataaatggcatcagcggtgcatttgttacctttgccccaataagaacagttgttgacctcacatagaattttctgctccatgccatcccctccttataaaggttctggattagtatagccggctggcttgccctctattcctcctggcggatatagcgtttatctcgcataaacattttccagaagaaataaaagcccggaaatagaatgataaatgcaacgatatacgttgcaaacagcgctctgaacgttgctggctctgtgaagcctgacatgactgtcacatcgggataaatcatatacggaagatgcgcccgcccgtacgcgtagcttgcgagaaaatactgtatcccaatcgcgacaagtgcaagccgcggttttccgatgttttgcccaaagctcttattaggcagaaaaagggcgattccagcaatgacaaatgtaatgaacgatgcaataatccaagtaaaatcattcatcattccgctgtacagccagtttgcttcattccgcattgtcaccataatgcatactgcaaacaacagtgaaatcgggccggtaatcagggcgctttttctgtaggctcggtacgcatcctgttcctctgccacatttgaaacatctgcaagcagcagcgaggacaaaaataaggtgcttaaaatcgcaaacccgataaatgaataggcgttggggcttgaaaagattttagacatatttaagttatagattccatccgttttttctataaaccctccgtgtgtcacaggaagcaccaaaattaaaatagcaggaatgataaagccggagatgccggaaatatatcttagcgttttccgctcctttgctgtatttgaaaacacgagaaatccgcttcgaatcgctaaaagcagtaaaatcatgcttccgggaattaataaaacggtgccgagcacaaatgtcgcgccggggaaaaaactgaaaagcgccacgacgatggccacaataaagacatttgtgacctcccaagtcggggacaaaaagcgattcgcaatatcggtggccttcatatgctccttgtttaaatagatcatagaccaaaatcccgctccaaaatccattgtcgccatgacggcgtaaataaacacaaagccccagataattgagatggcgatcagagcgtcagttgaaatctccatttgtcgatcttccttccatttggtttcctgtttgcggagccattacgactccgctgtatttaaatcttcgtcaaccgggtgcttgcggaaatagtacagcagcacgtagacgacagcagcgcctaacacggcataaacaaatgtgaaaaacaagaagagcactccgatcgaaccagtcgttgttacgacatccgatgttttcagcagatgatagatgacccaaggctgcctccctgtacaggcgaaaatccagccgaattcaatgccgataagactaaaaggccctgctgtcatgaaaatgaccaaaagccacgtcgggaaacggtctttcttaagcacctttctccagaccacaccgatgatggaataaagaatcaacagcatgcctactccgaccatcgcattaaacagcgtgtgaataaaaagcggcggccattcatctctaggaaatgcattcaatccctttacaacagtgtcaaaacggttcgctgccaaaaagcttaaagcccatggaatctcgatagcccattttactttttcttcattcgggtcggtaaaaccgccgatagcgagcggggcgtgggatcttgtttcaaataggccttccgcaccggctaatttttcgggctggtattcgtacagcatctgtgcagattcgtgtccgttcaaagcggtcagcaatgaaaaaataccgccgatcgtcagtgcgagcaaaagggctttccggtgaaagcgatagaccttttcctttttcctcgttcggatcattttatacgccgcaacagaagccacgataaacgcaccggtcataaacgcggacagcacgacatggccggcagtgataaaaaagctaggattaaaaaacgcagcccacgggtcaacatctgtaatttttccgtttaaaattttaaaaccggcgggcgtaccttcaaaagcgtgaacattcgtgatcagaacagcggatgctgctgccccgactaacacaaagaaaacagcaacaatcctcattgcaggtgacaaacggtctgcagcgtatacataaatcgacatgaatagggcttcaacaaaaaaagcatagatttcaatttgaaatggcagggacatcacccggccgatgacttccataaatcccggccataaaagcgcgagctgagtgcccgcgatcgttccggtcggtatggcgacccccagcaaaacggcttgtgctttcgtccatcttttcgccatgatcgcataatggtcatctttcgttttttgatagatcaattccgccactaaaatcatgagcggcagaccgactccaagtgttgcgaaaatgatatgaaagcccatcgtcgtgccaaaaaggcttctggccaaaactaaatcatccacaatcgtaaaccacctttctaaaaagacgttctgtatgtattttgggtttattatttgcttcctcggttagattattcttcctattcttaaatgccatgaggtttacgatgtgaaaacagagggaaggatgtaagaagattgacaaaacgtttgtgacgttataaaataaaacgtaattattacgatttattgaaaggagatacccatgaaagaaggaattcatccaaagaaccacaaagtgatatttcaggatgtcaacagcggctaccgttttctcagcacctctacgaaaacatctaatgaaacagcagagtgggaagacggaaacacatatcctgtcattaaagtagaggtaagttctgacacgcatccgttttatacaggccgccagaaattcaatgaaaaaggcggacgagttgagcagttcaaaaaacgctataacatggggaaataaggcagaccagagggtttgtctttttttattatgacgaataaacaagggttgtgatatattgaagagtaaaaagaatagaaagggacaacgaacatgagtcttctaaatgatattcttgaatttaacaagacatttactgaacaaagagagtatgaaaagtatcaaacatcaaaatttccagataaaaaaatggcgattctttcttgcatggacactcgtctggttgaactgctgccgcatgcgatgaatttgcgaaacggtgatgtgaaaatcattaaaagtgccggtgcgcttgtgacacacccattcggaagcatcatgagaagtttactcgtcgcagtgtacgagctgaatgcagatgaggtgtgtgtgatcgggcatcacgattgcggcatgagcaaaatcagcagcaaaagcatgcttgaaaaaatcaaagcaagagggattccggaagaacgcatcgaaacaataaagtactccggtgtagactttgatcaatggtttaaaagctttgattcagtggaagcgagtgtgaaagacagcgtagacgttattaaacatcacccgctgttccctgaaaacgttccggtccatggcttagtcattgatcctaaaaccggaaaactggatcttatcgtaaacggttataacaattaatgtttttgtttcttttcaggaacgggatcgactcctcccggatggaacgggtggcatttcaaaatccgtttgattgtcagccatccgccttttaaagcgccatgtgttttaatcgcttcgattccatattgggaacaggtcggataaaagcggcacgttggcggtgtcaggggcgagatgaatttttgatatcctctgatcagagcgatgaatagggttttcatgtttcttcagcaacctttctgatgcaagtataagaaaaaaaacacagattgaaaagttaatcaataattcttatcggaaaagtatgttataatgaaattacatttttaaaaaagggagagtgccattatgccttcagtagaaagttttgagcttgatcataatgcggttgttgctccatatgtaagacattgcggcgtgcataaagtaggaacagacggcgttgtaaataaatttgacattcgtttttgccagccaaataaacaggcgatgaagcctgacaccattcacacactcgagcatttgctcgcgtttacgattcgttctcatgctgagaaatacgatcattttgatatcattgatatttctccaatgggctgccagacaggctattatctagttgtgagcggagagccgacatcagcggaaatcgttgatctgcttgaagacacaatgaaggaagcggtagagattacagaaataccagctgcgaatgaaaagcagtgcggccaagcgaagcttcatgatctggaaggtgctaaacgtttaatgcgtttctggctttcacaggataaagaagaattgttaaaagtatttggctaaaatagaaaggacctttttgcgcttaagcaaaaaggtcttttttgtgacgtctcatattttgtgtaccatttgctgtaagcgtttgctactatttaagtaaacgatgaaagggtgatggcatgaaaaagatgttggttgttctgcttttttctgcttttttgcttaatggatgcggatctggtgaaagcaaagcaaatacagctgagacgcccgaggttttggatgtcaagctgaccgggcctgaaaaagtaaatcccggagaaagcgctgcttatgaagcagccgtatcatatggtgatgaagctgtgacggatgccgatgaagtagagtttgaagtatggaaagaaggggaaaaagacgcaagccaaatgtttaaggcgaaacaagaaaaaggcgtataccgattggaaacgacgtttaaggaagatggtgtatacactgtccaatctcatgtcacagcaaaaaaacagcatagcatgccgaccttaaaagtccaagtcggagacgccgatgctgccagcaatcagtcagaagaggagcattcacatcatcattgattgtgtgaatcagagtgattttcttgtggtggatcaatggtatgctttacattataggcttttacagtcgtccaaatggttacaagcaaaacagccagcacaatcaaaatacttatcgtaatgagaagcgtcatgacattccacctcccgttttttaacaattgtagcataatagaagaaatcgtgacagataagggtaaaaaagaggttttagcgtacgatattaagggtatacatagtcatataacaaggaggagataccatgtcagaacaattgattcaagcagtgaacaaacaagtagccaactggacagtcatgtatgtgaaactacataattatcactggtatgtgaaagggaaagatttcttcactcttcatgaaaagtttgaggagctgtacaacgaaacagcaacttatattgatgacttagcagaacgtcttttggcgctgaacggaaaaccgattgcaacaatgaaggaatccttagaaacggcttctgtcaaagaagctgctggaaatgaaacagctgaacaaatggttcaaagcgtatatgatgatttcacagtcatcgcggaagagctgaaaaacggcatggatttagctgatgaagtcggtgacgaaacaacaggggacatgcttcttgcgatccatcaaaatattgaaaaacataactggatgctaaaagcttacctaggttaagttcaaaaatagaacggccggatgtcttaaaaaagacgtccggcttttctttttgtatcttaaaaataggcgacaaccagtccatttttctgaaaaatccaatccgttcggcttgtttaccatagaatattgtaaggccgtttctgtgaaaggatgttgggataaatggatagagactttggcatcttttcgtttttagcagtcagcgtttcagcagcgggttttttctttggaggttttcagtattcatttctgattttgctctctcttatggcaattgaatttatcagtacgactttgaaggaaaccattattcacaaactgtcatttaaaaaggtatttgcccggcttgtcaaaaaattagtcacgctggctctgatctctgtatgccacttttttgatcagctgctgaatacacagggatcaattcgtgacttggctattatgttttatattctttatgaatctgtgcaaattgttgtgacagccagttctcttggcataccggttcctcagatgcttgtcgatcttttagaaacgttaaaaaataaatttaagcgcaaaccgtaacttttccctgttcgcgggtcataataaagcccagagcgtcggtcgcactttccggcaaaagtatcgcaaaaaaactgtacgagctagtctgcatgcagaacctgacggcgtgctgggtttcccttattttttgataaaaggcttccgaagaaacgtaactgtggtatgatgtatggaagatagctaggaacggatttgagggataaacatgtacgagtttaaagattattatcagaatactgttcagctttcctttgacgatcagcctttctcggacagcccgaagcatgtctgggtgatttgccgttttggcggcaaatggcttttaacagaacatgaggacagaggctatgagtttccaggcgggaaagtagagccgatggagtgcgcagaagaggctgcgctccgggaagtaaaggaagagacgggcgcgagagtcaaaagcctcaagtatctcggacagtataaagttctcggaaaagaaaaagtgattgtaaaaaatatatattttgcagatatagaaaagcttgaaaagcaggctgattactttgaaacgaaaggcccggttttgtttcacgagctgccggagaacctttcccgcaataaaaaattcagctttattatgaaggattccgttcttccgatcagcttgaaaaaactgaaagaatctggatggattgaataaaaaacccggcacatgtgccgggttttttatgtcctccccttcgtccatttcttttccagcagctcgacgccctgatacatcagagtggcgaagatggcgatgatcagcaggcttaagaagacgagtgtaaaattgaagacttggaatccgtaaataatcatatatcctaatccgaccttcgaaacgaggaattcccctacaataacgccaacccatgataaaccgacgttcacttttagtgttgaaataatcgcgggggaggatgcaggcagtatgacttctttaaaaataacccacttttttgcgccgaatgttttcatgactttcgtatagttttcgtcgacctcttggaaggcggtgtagacaacgatggttgtgataatgacgctgatgatggctcccatcgcaatgatgctgataaaactgggaccgagcgcgacaatcaggatcgggcccagggccactttcggcattgcgttcaaaatcacaagatacggatctaaaattctggcaagtcggttagaccaccataacaaagcggctaggcacgtgcccataaacgtcccgagcaaaaagccaagcaccgtttcaaataaagtgacgccgatgtgtgacagtaaagaaccgtcaccaagtttctccagcaataatcgccacacagctgatggagagctgaagatcagcggatcgatccagccctgcctgctggagatttcccagcccgagaaaaagagaataaatatggcaagctgaaaggaatggaccttccacttttcctttttctgtttgaattgatactgctcgtgaagcagatcaatggtttctttgctgtttctcaagagaattcagctccttccatatcgtttgaaacagtgtctggaaggaaggttcctgacgggcgtcaaaaggcaacatcgcggccaattccttaggaatggtaaaaatctgatggatggtgcccggctgatttgaaaataaaaagatcgtatcgctcatcgctatcgcttcccctatatcatgagtgacaagcactgctgttttttgatattcctttaatgtgcggaataccaggttttccaaagacagctttgtctgaaaatcaagcgcggaaaatggctcatccagcaaaagcagactagggttaggcgcaagtgttcttgcaagcgcagcccgctggcgcatcccgcctgacagttctttcggatattttttctccacatctatgaggccgaactccggcaatagaccgagtgcagcggctttgctttcttctgtcagcgtgtcggcgatttttaaaccgagaagcacattttcctcgatagatttccagggaaataagtaatcctgctgaagcatatagccaatattatgttctttttgattcggctcacggccttcaatcagaactctgccttctgatggctcaatcaaaccggcaataatggaaagcaatgttgtttttccgcagccgcttgggccgagaaatgagatgaaatcgcctttttcggcatcgaaatgaatatcccgcacagccgttgttttttctttaatagaaaaataagtatgggttacatggtcgacatgtaagaaagacatagatggcgcctcctatttctccgaggtgactttttcagcaatttctttatttacaagctgattgtatggaatgtgcttcggcagttctcccgatttatccataatggtttggagaagctcccattctttttcgttaagcagagggtctggtgaatatgaatgctgttttttatagcgttcaatggatgtttcgatgacgtctgggtcggtatcatcaaattcatctttaatggcatctgtgatgtccttcgcagaatgattttcaacccactgctgcgccttataaatggcttttgtaaacttgacggctgtgtcttcatttttcttcaaatagctttgtttcgccataaaagtcgtataaggaacctctcctgattcttctccgaatgaagccacgatatggccgatgccttttttctcaaagagagaagcctgcggttcaaagagctgtacatactcaccggttccagaagcaaacgcattggcaatattggcgaagtctatgttctggatgaggtctatatccttatgcgggtcaatcttatgtttgttcagtacatactcgccgaccatttgcggcatgccgccttttcgctgaccgagaaacgtttttcctttcagctgatcccagtcgaagtgttcaacatcttctctcgcgacaagaaacgttccgtctgtctgagtcagctgggcgaaattaatgacgggatctttagccccttgcgcttcgacataaatagatgtttctgacccgacaagcgcgatgtcggagccgttggaaagaagcgatgtcatcgttttatctccgccccaggtcgtattcacatcgacatcaagcccttcttccttaaaaaaacctttagactcagcaacatataaaggtgcgtaaaaaattgaatgggtcacttcagctactttgactttggtgagcgtttcttcctgcttgcaagccgccagggcgaacatcagaaaaatactgccgacacaggcgaagcccagccttaaccatctgttcacatagacaacctccttatttcgcatcaagttaatatccttttttgctttacatatcgtatgatgggtataaaaatgtgtgaatgcctaaccaggttctccggatgtaattttggagtaaggaaagcatatagaaaaaaggaggcggctgttttgattgtagagaaaagaagatttccgtcgccaagccagcatgtgcgtttgtatacgatctgctatctgtcaaatggattacgggttaaggggcttctggctgagccggcggaaccgggacaatatgacggatttttatatttgcgcggcgggattaaaagcgtgggcatggttcggccgggccggattatccagtttgcatcccaagggtttgtggtgtttgctcctttttacagaggcaatcaaggaggagaaggcaatgaggattttgccggagaagacagggaggatgcattttctgcttttcgcctgcttcagcagcacccaaatgtcaagaaggatagaatccatatcttcggtttttcccgcggcggaattatgggaatgctcactgcgatcgaaatgggcgggcaggcagcttcatttgtttcctggggaggcgtcagtgatatgattcttacatacgaggagcggcaggatttgcggcgaatgatgaaaagagtcatcggcggaacaccgaaaaaggtgcctgaggaatatcaatggaggacaccgtttgaccaagtaaacaaaattcaggctcccgtgctgttaatccatggagaaaaagaccaaaatgtttcgattcagcattcctatttattagaagagaagctaaaacaactgcataagccggtggaaacatggtactacagtacattcacacattatttcccgccaaaagaaaaccggcgtatcgtgcggcagctcacacaatggatgaaaaaccgctgacagtgaaatatgttatgataaagaaaaaagagaacgaaaggggatttcactttgggaatgcctgttgaatttaatacactgattgtgacaaaaggaaaagaagttcgcatagatgaaaatatattcacgttagagaaggacggataccgagtatatccgatggagattccaatggatgtacgcaaaacaaagtttggcgaaaagtcaggcacagctgaagtgcagaagcttcaatgggaagaaggccggaccatcattacatacaagctgacttctttgcattccgtcaattaaaacaagccaagagcataattgctcttggcttttgttttttatacgagagggccgcctgcctgggcgatggcatcggtatgtgcgaactttttaaagttctctttgaattcatttgcaaggtagactgctttttctttgtattcttccttgttggtccacgtgttttcaggctgaaggatatgatcaggaacgccaggaacatgggccggaatgtgcaggccgaaaatatcgtcagttatcatttcagcatcctctaatttgccttcaatcgctgctttgaccattgctctagtgtaagaaagcttcattcgttcgcctgtgccgtagccgcccccggtccatccggtattgactaagaaaacgtctgcgccgtgttcatcgatctttttgccgagcatttcagcatagacgtgagcaggaagcggcaggaacggtgagccgaagcatgtagaaaacgtcgtttcaggagacgtgacaccacgttcggttccggcaagcttactcgtgtaaccgctcaaaaaatggtacatcgcctgctccttcgttagtttgctgatcggcggcaggactccgaaggcatcagccgtcaaaaatacaatggctgacggatggccggccatgcttggagtcacgatgttattaatcatatgaatcgggtaagctgcccgcgtgttttcagtatagaaggaatcatcataattggcttcgcgtgtatcttcatccacaacgacattttcgagaacagacccgaagcggatcgcgttaaagatttgcggctccttttcctcgcttaaatgaatacacttagcgtagcatccgccttcaatattaaagacgcctgtatcagaccagccatgttcatcgtcaccgatcagcttgcggtcagcatctgccgacagggtggtctttcctgttcctgacagtccgaagaaaagggcgacatcgcctttttcaccgacattggcggagcagtgcatagataaaatatctctttcaggcagcaggaaattcataatggagaaaatggacttcttcatttcaccggcatactcagttccgccgattaaaattgtccgcttttcgaaagagacaataataaacgtttcggaatgagtgccgtctgtttttggatccgctttgaaatgcggagcagaaagaatggtgaacggctgctcaactgttttcttatcatttccttccggacggataaacagctgccgcgcaaataaattgtgccatgcgaactcatttacgacagtgatcggcagcctgtatttctcgtctgctccggcaaatccttcgaaaacaaacagttcatctcgctcctttaaatagctgacaactttcgtgtacagccgctcaaacgcttcttctgaaatcggctgattcaccgggccccaatcgatcttatttttcgtgctttcttcttccacgatgaatttatctttaggtgagcgtcctgtgtaagcgcctgttgtcgcgcgaacagcacctgtggatgttaaaatgccttcgtttcgggagaggactttttctgttagctgtgctgctgataaattatgacgcacatttggacatgttaataaggcttgtaaatctgcggtcaaatcaactgagttcatatgaaaccttcctttatcgttttttgtgttttgctaattgtgaattagtataacatatattttcaaatagtctatactatttattattttttgtgtgtgcatttccattgttttccctcaatataggtgcctatttcttctgaatcatattgacattgcaaacccttttacgataagatatttcattgagcggatactcttatcccgagctggcggagggacaggccctatgaagcccagcaaccggtttctctgttattcattatgttcaactgagtgagacaaccaaggtgctaacctgttgcaaggttgtatgattccttgagcgataagagtgaaaggcacaaagaccaaaccctttcctcgatggaaaaggtttttttatttcataaatatgccaattaacattctctaatataactgtacattgtataagagggagcgagttccgtatcatatatacaaggtctttcgggaggccttgtgcaggaggaagcaaatcatgagtaaaaatcgtcgtttatttacatcagaatctgttacggaggggcatccggataaaatctgtgaccagatttctgacagcattttagatgaaattttaaagaaagaccctaacgcgcgtgttgcttgtgaaacatctgtgacaacaggtttggttcttgtaagcggagagatcacaacttctacgtatgttgacattccgaaaacggttcgccaaaccattaaagaaatcggatacacacgtgcaaaatacggatttgatgcggaaacttgtgcggttttaacatcaattgatgagcagtctgctgatatcgcgatgggcgtagaccaagcgcttgaagcccgtgaaggcacaatgagcgacgaagaaattgaagcgattggtgcgggtgaccaaggattaatgttcggttatgcgtgcaacgaaacgaaagagcttatgcctcttccaatttcacttgcccataaattagcccgccgcctaagtgaagtccgtaaagaagatattcttccgtaccttcgccctgacggcaaaacacaggtaacggttgagtacgatgaaaataacaaaccagtccgcattgacgcgattgttatttcaactcagcatcatcctgaaattacacttgagcaaattcagcgcaacattaaagaacatgtaatcaatccggttgttcctgaagagctgattgatgaagaaacaaaatatttcatcaaccctacaggacgtttcgtaatcggaggccctcaaggggatgcgggacttacaggacgcaaaatcatcgttgatacgtacggcggctatgcacgccacggcggaggcgcgttctcaggtaaggacgcgacgaaggtagaccgttctgcagcttatgcggcaagatacgttgcgaaaaacatcgttgcggctgagcttgctgattcttgcgaagtacagcttgcttacgcgatcggtgttgcacagcctgtgtcaatctcaatcaacacattcggttccggaaaagcttctgaggaaaaactgattgaagttgttcgcaataactttgatttacgacctgccggcattatcaaaatgcttgatttgcgccgtccgatctacaaacaaactgctgcgtacggccactttggacgtcacgatgttgaccttccatgggagcgcacagacaaagcggagcagctgcgtaaagaagcgttaggagaataattttatagccgcttactggttaagcggctttcccttttttatcgttgtattcatgtttatttttttacataactgtgaaaccaaatactattcacagcgtctataaataggggttcaatgatgacaattttaattatggaggcaatactatgtgtggatttgtcggggtttttaacaagcatccgttagctcaaaccgctgatcaagaagaactaatcaaacaaatgaaccaaatgatcgttcaccgcggtcctgacagtgatggatatttccatgatgagcacgtcggcttcggattcagacggctcagcattattgatgtagaaaatggcggacagcctttatcatatgaagatgaaacatattggattatctttaacggagaaatctataactatatcgaactgagagaagaacttgaagcaaaggggtacacattcaacacggattcggacacagaggttcttcttgcgacttaccgtcactataaagaagaagcggcgtccaaactgcgcggtatgtttgcctttctgatttggaataaaaacgatcatgtgctttatggggcaagagatccattcggcattaaaccgttgtactacacaacgatcaatgatcaggtttattttgcctcagagagaaaaagtttaatggttgctcagaatgatattgaaatagataaagaggcattgcagcagtacatgtctttccaatttgttcctgaaccaagcacgcttgatgcccatgtgaaaaaagtagagccgggttcacaattcacaatccgcccggacggcgatatcacattcaaaacgtatttcaaagcgaacttcaagccggttcagactgaagaagacaagcttgtgaaagaagtccgagacgcgatctatgactctgtaaacgttcatatgagaagtgacgttcctgtcggttcgttcctgtctggcgggattgattcttcctttattgtgtctgttgcgaaggaatttcatccaagcttaaaaacattctctgtcggctttgaacagcagggcttcagtgaggttgatgtagcgaaagaaacggcagcggcgctgggcattgaaaatatcagcaaagtcatttcgcctgaggaatacatgaatgagcttccgaagatcgtatggcattttgatgacccgcttgctgatccggcagcgattccgttgtactttgttgcaaaagaagcgaaaaaacatgtaacggttgctttatcaggtgaaggagcggatgagctcttcggcggatataacatttaccgtgaaccgctttcgcttaaaccgtttgaacggattccgtccggcttgaaaaagatgcttctgcacgttgctgccgttatgcctgaaggtatgagaggaaagagcctgcttgagcgcggctgtactccgcttcaggatcgttatatcggtaacgcgaaaatctttgaagagtctgtcaaaaagcagctgttgaagcattataatccgaacctttcatatcgcgatgtgacgaagacttactttacagaaagcagctcgtacagcgatatcaataaaatgcagtatgtcgatatccacacttggatgcgcggcgacattttgttaaaggcggataaaatgacgatggcgaattctttggaactgcgtgtgccgttcttggataaagtcgtattcgacgtcgcttcaaaaattcctgatgagctgaaaacgaagaacggcacgacgaagtatcttcttcgcaaagccgctgaaggaattgtgcctgagcacgtattaaaccgcaaaaagcttggtttccctgtaccgatccgtcattggctgaaaaatgaaatgaacgaatgggtgcggaatattattcaggaaagccaaacggatgcttatatccataaggattatgtccttcagcttcttgaagaccattgtgcggacaaggctgataacagccgtaaaatctggactgtactgatctttatgatctggcacagcatcaatattgaaaaacggtatatgcctgaagagctgagccatcagcctaaagaagtcatctttgtgtaacagacaacaaggctttcgagtagtcgaaagccttgttgttatccttttatttctccatcatcattggtttacccaattcatacggaatattcagaaaaatgatttaatgatatttttttctaggggagaagaagcatgcaaaaacaaaaacaagagctgcaccgcggactcgaagaaaggcatatttctttaatgtctttaggagctgctataggagtagggttgttcctcggctccgcatcagctattcaattagcagggcctggtattctggtagcgtatgccgcaagcggcctgatcatgttttttattatgagagcgcttggggaaatggccattcaaaaaccggtcgcaggctcattcagcaggtatgcgcgtgactatttgggaccgcttgcaggctatttaacagggtggaactactggtttttatgggttgtcacctgtatggccgaaattactgctgtcggcatctatatggggttctggtttccggacgtgcctaactggatttgggcattatcggcgctggtcattatgacgggtgttaatttcctggctgtcaaagcttacggcgagctggaattttggttcgcattgattaaaattgttgcgatcttatccatgattgctgtcggtttattgatgattattgcaggagtcggcaatggaggcattgccaccggaatcagcaatttatggaacaacggtggatttttccctcatggtttaaaaggggttctattgtctctccaaatggtcatgttcgcctatttagggattgaaatgatcggggtgacggctggcgaagtaaaaaacccgcaaaaatcgttagccaaagcaattgatacagtattttggcggatattgattttttatgtaggcgctttatttgtcattatgtctatttatccgtggcaggaaattggctctcaaggaagtccatttgttctcacatttcaaaaagtgggcattccatcggccgcaggtatcattaactttgtcgtgttgacagccgcgctgtcttcatgcaacagcggtattttcagcacagggcggatgctgtttaacttggcagaacagaaagaggcgccacaagcatatggtcagctgacgaaaggcggcatcccgggtaaagctgttctggcttcagcgggggctttattagtcggagtgctgttaaactatgttgtccctgcgaaggtatttacttgggttacaagtattgcgacgttcggagcgatttggacgtgggcaatcattttgctttctcaaataaaatacaggaaaagtttaaaacctgaagaaaagaaacaattaaagtacaaaatgcctttatttccgtttacgtcttatgtgtcattggcatttctagcattcgttgtcattcttatggcttacagccctgatacaagagtagccgtgattatcgggccgatatggtttctcatcttgctggctgtgtactatggaaaagggtttcacaaaaaaaatgcagcagctgccagcgaacgaaatatcagctgacaaaaagagctcccagtgggctctttttgtgtgtgctcatagaaaatagagaacaggaaagaataggtatgtgtttttgcagaggctgtttatagttttgtgataagataaaagtcatacgtttcatgctatatgtgaacgttttatggaaaaatcgaaacccgaactgttatgacgtccgggttaacgatggttattgctttcaaatataatttgaaaaatggtaaagtaagacgaagcaggtcttatgtttgttgaagaaatttataatattggcccttttctacatattctgaccgtattctttgcatatcttttcggtcttcttccgtcaaagggcggatgacttttgcagggcggccaaaggcgagatggccaggcggaatgatttttccgggcgggacaagactgccggcaccaataaaagcgccttctccaatttcggccccgtctaaaatgattgagcccatgccgattaaggcgttcttgcggataacagagctatgaagtgtaacctgatggcctatcgtggcgtcatcttcaatgagtagcgtcttgttcgggctttgatggaggcagcttaaatcctggatattgactctgtttccgattctggtcggcgcaacatctccccttatgacaacagaaaaccaaatgctggactgttctccgataacgacatcaccggtaattgttgcattatcagctataaaggctgttgggtggatatctggcttgtgttccttataagggtagatcataagattcatccttctttctctatttaaatttcgtatgaggtgaagagcatgtggacctggaaagcagacagacctcttgcagtgattgtaatcattcacggagcaagtgaatatcacggacgatataaatggctgattgaaatgtggcggtcttcgggttatcacgttgtcatgggcgatttgcctggacagggaacaacgacaagagcgagagggcatattcgctcgtttcaagaatacattgatgaagtagatgcttggatagataaagcgcgaacctttgatcttccggtttttcttctaggtcacagcatgggcggtctggtcgcgattgaatgggttaaacagcaaagaaatccccggattacgggaattattttatcatcaccgtgtctcggactgcaaattaaagtcaataaagcgcttgatcttgcatcaaaaggcctgaatgtcatcgctccgtcacttaaggttgattcgggattatcaattgatatggcgacgcgcaatgaggacgtcatcgaagctgaccaaaatgattcgttatacgtcaggaaagtttctgtcagatggtacagagagcttttaaagacaattgaatcggcaatggtgccgacagaggcatttttgaaagttccgcttcttgtgatgcaagccggtgatgacaagcttgttgacaaaacgatggtcatcaagtggtttaatggtgttgcttctcataataaagcatacagagagtgggaagggctttaccatgagatcttcaatgaacccgagagagaagatgtctttaaagcagcaagagcgtttactgatcaatatatttgaactagtagggggtgcatgtgttgacagtaccggaacatccttttggattgatggcaaaggtatatcgagatatttttccgctcgttcatcaagagctggacatatggaagcaaaaatcagaatcgattcataacagtgaattgaaagcacaggcaaccgcaagtattcgggacaaaacgtttcactgtgaaggcggcggcatactggccttattgtcaggcagccaaaagcagaaatgtgtcgagtttatcatcgcgtatcaaacgattagtgattatttggacaatctatgtgaccgcagcacctcgctggacccacaggattttcggatgctccatgcctcaatgcaggacgcactgacagtgggagcggaactgcaaaactattatcaattcagggaagaacaggatgacagcggatatctgcacgaactggtcaaaacgtgccagcgtgtccttggttccattgagcactatgacatgattaaaccttatctgcttgaactgtgcggctattattgcgatttgcaggtgcataagcacgttattgagcatgagcgtgttccgcggcttgaaaagtggtttactcaatatgaatcagagctgcctgagatggaatggtatgaattttcagcctgtgcaggctcaacgttaggcattttctgtctggttgcgtattcgttccagcctgatttcacagaaagcaccgctaaaaaaatccgcgacagttattttccttacatacagggtcttcatattcttcttgattatttgattgatcaagaggaggacttgctggaaggagacttgaatttctgctcgtattatcagtctcatgaagagatgatgaatcggcttgaacactttatccataaagccgacgagcatttacaaggcattccgcatgaaaacttccatcgtttaatcaatcgcggcttgcttggtgtttatttgtcggatgataaagtggcaggccaaaaggaaatgggccggctcgcaaagaagctgatcaaagccagcggaaaaacctcccttttcttttatatcaacggcagagcctaccggaaatttcaaaaaatgtcctggatgaaaaactcaaagaaaaaagctcaaatcatttgctgatctgagcttttttttcgatggcgacaataaatggcgggtcattttgctgattgataaacccgtatgttaatacacgggctgtttgctggtccaagtcccggcaaaactcgagcacgtcgtttttttcagctttgccttccgggtggccatgatagacgacgagaacaatcagaccttcgtctttcatgatgctgagaagctgttcaatggctttgatcgtagaactgccgtttgtcgtaattgatttgtccccgcccggcaaatagccgaggttaaataccgcggccgccactttgccatgtgtttcaggcgggagggattcagcgattttatcatggcttttgtgaaataacgttgttcgcgcttgatacatgtcaccgagccgttcctttgtattggccacggctgattcttggatgtcgaatgcgtatacatggccgttttcaccgacaagctccgctaaaaactgtgtatcatgtccgttgcccattgtcgcatctacgacaatatctccctctcccgcggccattttcagcagttctttgctgtaaggaagaattttcttcaaaatcatagcgctgattcctcctcaagccgttgaaagaactttccttgatagctgcctcgattttctagctctttattaatggcgccaagcacttcccatttgttgacgctccacattggcccgatcatcaactcaatcggtccgtcacctgtaatgcggtggacgatcatttcaggcggaatgatctcaagctgatcgcagacgagctgcacataatcatcttgagaaagaaattccagcttgcccttttcatattgtttgaccatcggcgtgcctttcagtaggtgaagcagatggattttaatgccctggacatccaaatctgcgacggcctttgccgtttccatcatcatgtcccggtcttccaaaggcagcccgttgataatatgcgagcagacacgtatgccgtgttttcttaatttattgacgccttccacatagcagttaaaatcatgtgcgcggttgatcaaaagtgcagtccgttcatgaactgtttgaagcccaagctccacccacaaatacgtacgttcattcagctctgccaagtaatcaacgacatcatcaggcagacagtccgggcgtgtggcgatcgaaatgccgaccacatcatctaaggcgaggacggattcgaatttctcacgaagcacctcaaccggggcgtgagtgtttgtgaaagcctgaaaataagcgatgtacttgccgtccttccatttttcgtgcatgcggtttttgatgtcatggaattgcgtaattaaatcatcggtccggtttccagcaaaatctccggagcctgctgcgctgcaaaacgtacagcctccgtgggctacggtgccatcccgatttggacagtcaaaaccgccgtcaagcgctactttaaacaccttatggccgaaatgttctctgagatgataattcaatgtatgatagcgtttttccgtatttgaataaggaaaaggattgttctgcatcacaattcatgtgcctccttgcgtacgattgcatcctaaaattgtagcacgcatttcacaagagaacaaatgaatatcgaccataaattactttattgaataaagtcagatgaggctacaatatgaatgatggatgatttccattaccaagaggaggggttactgtggcaacaagacaatcagtagatgaacatctccagcaatgtatgcaggcctatgattatgctgaagaacagctgaaaatcgcttctaaacaagagcattataacgatcaagaatatagtgatgcacaaatgcagctagaagatgcggtaaatgccttgaataaactatggctgtcgtcaaatgatcagcagagagaacagctgtacagaatgagacttcagcttcaatctttgcaaaataatatgatcctgcagcaccctcttgatgtgtaggaaaacggacccttttaaaagggtccgtttttttgtaaaaaaaggattgactttgtgagtcaaagtatttattgtattaagtgtactaattgaagtaatacactatagacactaatataaaatcatttatatattgacattaagggaggcagttatgaaacataaaaaacgaaacaaacgtaacgtgccaatgctgattgcggcatctgtgatcgcttgttctttttttcttgttcttgtgatgatcggttttgaatggcaaaaaagtataattgatcatttttatctataaaaggttcagatcgtatagaaagtagggaagtaaatgattcaaatcgatccaagaagctcaacacccatttacgaacaaattattcagcaaatgaaagagctttgtttgaaagggatcatgaagcctggtgataagcttccttctgtcagagaattggcaacgatcattattgcgaatccgaacactgtcagcaaagcgtataaagaacttgagcgagaggggattattgaaacgctgcggggcagagggacctatatatcggagaatgcaaaaacgacactggttgaagggaagatgacgatgattaaagagcaactcaaacagctcatcatcgatgcacactatgcaggggttgagctggaaaaactgcacgaatggataaaggaaatcagcgctgatgtgaagggaggcaaaaaaaatgattgaactacggcagctgtcaaaagcgattgacggcaatcaagtattaaaagatgtttcattaacaatcgaaaaaggagaaatctttggattgcttggacgcaacggatcagggaaaacgacgatgcttcgcttaatccagcaaatcattttcgctgacagcggaacgattttatttgacggcgtagaaatcaaaaagcacccgaaggtcaaacaaaatatcatctacatgcctgttcaaaatcctttttacgacaagtatacatacaagcagcttgttgatatcctgagaagaatatatccgaaatttgatgtcacgtacgcgaatgaactgatgaacagatacgaaattccagaaacgaaaaaataccgtgagctgtcgacaggcttgaaaaaacagctgtcgctcgttctgtcgtttgcggcgagaccggcgctgatcctccttgatgagccgacggatggtattgatgcggtaactagacatgatgtgctgcagctgatggttgatgaagtggcagagcgtgatacgagtatcctgattacgtcccaccggcttgaagacatagagcggatgtgcaaccgaattggttttctcgaagataacagactgaccaacgtcatggatcttgatgagttaaaagaagaatacattaaaattcaaatggctttcgatacagatgtcaatttggccatcagagagcaaaacattccgatgctcgatcaggccggcgtgttttacacagtgctgattccgaaaagcgatgaggagaaaaagagctttttgagagagctgaagccaaaagtatggaatgagcttcctgtcaacctggaagaagtgttcattgcgaagtttggagggaagcggagatggtagaccgaggtctcctctatcgagagtggaagcagaatcaagtggtgattttgttaagtatcgcgtttttagtattggcaaatccgctttctatcgttaatacgtatttgtcttatcaagggtgtctggctcatcaagacccgcaatattgtgaatttattgtgaattatcataggagcaatctaatagatatcaactgggtgccgggggtcattttggcggtctgcttcctcggaatggaacgttcgaaaggcacgatggattttatattaagcctcccatataacagaagccaaatttttcagacaaaattttggttaggcggttttgtgattgtgctgtcacaattgattggctttttacttgcatggctgctgattcttgtctataaccctgaacacgtctacttttttgagcacagcagcattggagtaatcgtgataagttttatggctttttcactggtgatggccgccggagcgttaactggaaatgcttttgcccaactgttaacggcgttttcagcagctatattgccgtatttaattattgcattgccggttggaaacctagaagttgtttttggtgcgaatatatgggaaatattcccttcccctgagagttatttctctctggcaagcaatttatcgaacctagtaccgattagttacgttgtaaatgaatggctgattaacagtaaatatcttttattgattccagccgtaatgagcatgctattttacttgattggctttataagcttcaagaagcttccaagtgaacggaacggacactttttcttatggaacagattagatcgcccggtgcaaattctggttatggctttcggcatccttggatttggtttatttggatactataccggacattccattattggttatattttgggtatgatcattggagcagtggctggattctttgtgagctacttctctatttataagaaaacaaaagtgtaagaaatgccttaggtttggagggaagtgagttgccggattccggactgctttacaaagagtggcggcagaataaagtcgccttagttatcaccattttggtttttatattaggtaatccattatcaattttaaatatgtatctcatctatcaaggctgtgtcactggaaaagaaaattgggtcggcccctgcgtattcagcgttgattatttaaatagctcatttatctcattgttttggatttggggagtcgttttggcggtcagccagcttgggattgaacgtagcaagagcttctttgattttacattaagccttccatatacacgagggcagatatttcatgcgaagttccttaccggcggaatggtgattgtggtgccgcagctcataggttatgttttgtctgttttgctgatcatgcttttgaagccagatcaggccgtttattttcacaattacagcttgggaatgattattgttagcatgctggcttattctttggttatggccggaggagctttgacaggcaatagtttcgcacagcttctagtctcatttaccgtggccatttcgccgtttttactcatcagcctgcctgtgatcaacctcgagatcctttttggcggatcaatagattttatccatggtccagtacctaaatgggtgcagtatttcattccgataatttatgtagactcgaaatgggctgagaattcaccatattatttagtcattccggctatcatgactatcattttttacatcatcggctatattagctttgttaaaatgtctaatgaaagaaacggatatttcttcttatggaagccgcttaaccgcccggtgcagatcatcgttattatcataggaatcatgggcttcggctattttggatttactgcaagcgagagctttgccggttatctcattggcatgggtacaggtgcggtaatcggtttcttgattagttattttgcgatttataaaaaaatgaaacttttgtaagggagagagaacatatgattgatgttcagcatatcgaccattctttcacgatcggaaaaaagggccgtgagaatgaagttccagtattgaaggatgtttcattgagcgtggcgaaaggggaaatcgcctgcattgtcggacgaagcggctcagggaaatcaacgcttttgaatttaatttccggctacatatcgccgacaaaagggcggattgtcattaatggcactgatgttacggggtttaatgaaaaggaatgggcgcaatttcggcttgaccatttcgggtttatttttcagagctttcagctcatcccgggtttaacgacgtatgagaatgtggaaatgccgctggcgttaaaaggaatcaagccatctgagcggaagcaaaaggtgcaggacatgctgaaacgcgtcggtctggaaaaccacgccgctcattatccgaatgaactgtcaggcggccagcagcagcgtgtcagtattgctcgagcattgattttaaatccttcgattatcttagcggatgagccgacgggaagccttgattcagaaacggaacatgaagtgctggaattgatccagcagctgaatcgtgagcgtggcattacatttgtgatcattactcacgatgatgaagtcgcttctatcggacattcaaaatttcagcttcatgatggtgtgctaaaaggaggaattaccgttgaggtttaaggatcaggttcattttatcagaagaaatatgaagaaaaacagacttcgcgtctttatgacgattcttgcgacaacaatggcgtgtgcgtttttggttgtgctgtcgtccgttggatttgggattcaaaagacaattacagatatgacaatgagccagcagattgtaacgaaagtcagtgtaatgggcaaggaaggagacaagcctattaaaaaagctgatttagagaagtatgatcacgtaaggtcagttgtagaaagaacgcaagtgtatgaaccaaacaaagctactttaggcaatcgtacaaatgaaagctcaaatctcatttttactaatatgaatgatgaattaaaggccaatatggaattggaaaagggaagagtcgcaaagtcggaaaatgaaatcgtagtaggatacgacttcgcaaagagattattgacgaaaaaagaatcggaagaatataacaaaaaaatcgaagaagcaaaaggaaatccagaagatataaaagaaccaaagggctatacgaaagatattctgaacaaaacaatagaactaagtgtatcgaagacagatcctaaaacaggggatgttacaaaaacaaaaacatatgactttaaaattgtcggtattacaaaaaaaccatctcaagactggatggaggactcaaacatttttatcagtgatcaattcaaaaaagatttttcggaattcttagatttcaaaggcggaaatgttgaaacgaacattggtgtttttgctgataagtttgagaatgtggaacagctgacaaatgatctaacagatgacgggtactatgtcacatcagtgactactgaacttgagggagccaataccttcttcatggtcttcaaaatcggactgatctttgtcggatgtatcgcagttatcatttcagcgatcggcatttttaacacgatgacgatggcggtgacagagagaacgcaagagatcggcattatgaaagcgattggggcgagcccgtcaatcattcgccgaatgttcttgatggaaagcgcgtatatcggaattttaggctgtgtgattgggattatcatttcttacggcgtgagctaccttgtcaacctggccgttccgatgattcttgcggccacaagcggaagcgatgcgggcgacttgaattacacattctcctacatcccggcgagtcttgtgatcattgccgttgtgatttgcggaggggtcgcagtcatttccggaatgaacccggcgagaaaagcaacaaaaaccaacgtgctgacagcgttgagaagagaactataatgcgaacgagccggctgagacagccggctttttctatagcgcatgatagcgttttgctatacacttgataaaaaaggaaaaagtgcggtgagttgattgtttaaacttttgctgattgaagatgatgaatcgctgtttcatgaaatcaaggatcgtttaacgggatggtcctatgatgtatacggcattcaggatttcagtcaggtgctgcaggaatttgcggcggttaatcctgattgtgtcattattgatgtacagctgcctaaatttgacggctttcattggtgccggctgatccgctcccggtcaaatgttccgattctctttttatcctcccgggatcatcctgctgatatggtgatgtccatgcagctcggggcagatgactttatccaaaagccatttcattttgatgtgctgattgcgaaaatccaagcgatgttccggcgtgtgcaccattataatacggagccgaatacgattaaaacgtggtgcggcgctgctgtagacgcggagcagaacctcgtcagcaatgacaaaggatctgttgaactgaccaaaaatgaaatgttcattctaaaacaattaatagagcaaaaaaacaagatcgtcagccgggaagagctgatcagaagcttgtggaacgatgagcgttttgttagtgataatacgctgaccgtcaatgtcaatcgccttcgaaaaaaactggacgccctgcagcttggtgcatatatcgagacaaaggtgggccagggctacatcgcgaaggaagaggacaagttctatgattaaagcattccttatcgaaaggcggagctggattgccgcgtttttgtttcagcaggctttgatgctgttcattgcttttgtcgatccttccatatcatttgggaatgtactttatatggtgtatttgtgcatcttgttttttatcatattcctttggttccgctatcggaaagaaacagcgttttataaaagcttgaaaacatgggagaacaatctcgatgtgacagccataaatgaaccggaaacgccgtttgaagcaatggttgaaagaagcattgccgggcaaacagaacacttgaagcagaccgcagcacggcatcgcttagcattggaaaatgaaaaagatgagctgatggcatggatccatgaggtcaaaaccccattaacagcgatgcatttaatcattgatagaatggaagaaaaagcactgaaatcccagctgtcatatgaatggctgcgtattcacctgcttcttgatcagcagcttcatcaaaaacgcatttcatttattgaaaacgacctgtcagtagaattcattcagcttcagcctttgatctttaaagaaatcaaagatttacaatcgtggtgtatccaaaaagggatcggttttgacatacagctcgaggccaaagaagtgctgagcgatgcaaaatggctggcgtttatcatcaggcagctgctgacaaacgcggtgaaatacagcgaagcctctgaaatcgagatcaaaagctttcaaaaaggggaacagacgcagctccaagtgaaagattgtggcaggggcattgatccaaaagatgtaccgcgtatttttgataaaggatttacatccacaacggatcaccatgatcaagcgtcaactggcatgggcctgtacctggcaaaaaaagcagcggcgccgttattgatccttattgatgttgagtcggagtttggtgcggggacagtttttacattaacctttccaatacggaatcaatttgaacatgtcataagcgtgtgacgaaaatgtcacatgcttttcttttttgttcgccgtatcgaaggaaaagcccggcattcctttttataatgagattatccaatataaaggagactgcgtaaatggtgattttagaagcgaataaaattcgaaaaagttatggaaacaagctgaataaacaggaagtgctgaagggcatcgatattcacattgaaaagggcgaattcgtcagtattatgggtgcttccgggtcgggaaaaaccactttgctcaacgttctgtcctcaatcgatcaggtcagtcacggaaccattcatattaatggaaatgacatgacggctatgaaggaaaagcagctggctgaatttagaaaacagcatttaggctttatctttcaggattacaatttgttagacacattgacagtgaaagagaatatccttctgcctttatcgatcacgaaactatcaaaaaaggaagccaatcgcaagtttgaggaagttgccaaggaactgggaatatatgaattgcgggataagtacccgaatgaaatttccggcggccagaagcagagaacatccgctggaagagcgtttattcatgacccgagcattattttcgctgatgaaccgaccggcgcgctcgattcgaaatcggcctccgatctattaaataagctgagccagctcaatcaaaaacgcaacgcgacgattattatggttacccatgatcccgtcgctgccagctactgcggcagagtcatttttattaaggacgggcaaatgtatacacagctgaataaagggggccaggacaggcaaacgtttttccaggatattatgaaaacgcaaggcgtgttaggcggggtgcagcatgaacattaatcagctcatcctgcgaaatttgaaaaagaatctccggaattactatttgtatgtgtttgcgctcatctttagcgtggcgctttatttcgcctttgtcacgctgcagtatgatccagcaattaacgaagtgaaggcttcaatcaagggagccgcggctattaaaaccgcttcgattttgcttgtggctgttgtggcgatcttcattttatatgccaatacgatttttattaagagacggagtaaagaaatcgggctgtttcaattgattggaatgacgaagcataaaatttttcgcatcttaagtgcagaaaatgtcatgctgtatttcggttcattagcgatcggggtagcggccgggttttcgatatcgaagctggtcttgatgattctgttcaaaattgtcgatgtcaaagcggatgcgaaactgcatttttctgagcaggctttggtccaaacggtcattgtgttctgcggcatttaccttttgatcatgatcatgaattatacgtttatcaaaaaacagagtattttatctttgtttaaagtaacgtcctccactgaagacaaagtaaagaaaatatcatttttccaaatgctgatcggcgctttaggcatcgtgttgattttgacaggatactatgtgtcttctgagctgtttggcggaaaatttaagaccattaatgaactgtttgttgcgatgagcttcattctggggagcgtcattatcgggacgtttttgttttataaaggatcagttacgtttatctcgaatatcattcgaaaaagcaagggcggctacttaaatatttctgaggttctgtcactgtcatcgatcatgttcagaatgaaatcgaatgcgctgctgctgacgattattacaaccgtttcagcgctcgccatcgggctgttatctcttgcttacatctcgtattactcgtcggaaaagaccgctgaacaaaatgtagcggctgatttttcattcatgaatgagaaagatgccaagttatttgaaaacagattgagggaaagcaacatctcgtttgtaaaaaaggcaacacttgtcctgcaagcaaatgttgacattgcaaatattatggatggaactccgaaagagatgcagggcgatcccggcaatatgcagcttgctgttgttagcgacaaagatgtaaaaggagtcgatgtggcggctggagaagccattttctcaggatacaccgacttgctgcaaaaaataatggttttcaaggactctggtgttattaaagtaaaaagcaagcacgaggcgcagccattaaaatataaaggattaagagaagagtttcttgtatcctacacgtttacaagcgggggcatgcccgctgtcattgtggatgacagcctgtttaaacagctgaacaaggataaggacccccgcattcagctggcgcaatctacatttatcggcgtcaatgtgaaacatgacgatcaaatggaaaaagcaaatgagctttttcaacaggtgaacaagaaaaacgagcatttatcaagactggatacaagcgctgcgcaaaaatcactgtttggtatggtgatgttcatcgtcggcttcttagggttaacgttccttattacatcaggttgtatcctttattttaaacaaatgggtgaaagtgaagatgaaaaaccgagctatacgattttaagaaaactcggctttacgcagggcgacctaataaagggaatacgcatcaaacaaatgtataacttcggcattccgctcgttgtcgggctcttccacagttactttgccgtccaatccggctggttcttattcggatcagaggtatgggcgcccatgattatggtgatggtgttatatactgcgctctactccatttttggttttctgtcagttctttcttataagaaggtcattaaatcgtcgttgtgaaacagaaaaagctccagacatactggagctttttgtttatcgttttggcgcccgataaccggcggcttcagcttcttcaactgagcaaaacatttcagccggatcggttgtccggtcgtagtatgtactgcctggcgtgtggtagatgccgtttttgcttcctttgatattacagccttctgctttgtcagctgttttggtttcatcacttttactcgtattgtttgaagaacttccagtgtcttcatgagaactggcagtttggctttccgtctcttttaattgattttcaagctttgttttatcttgtcggagtgtttcattttcagcctttgccgtttttgcatcttctttgagctgcttttgattttcttgaagctctttaatctcagcttttaatgatttctgagtcttttttagatcgctattttcgtttttaagcttctcaagcttgtcttgatcttctttgttgtcttttaatttctttgcttcagagctgacagatttatattctttctcaagttcttcgtgctcttttgtgaggtttttatattcggcgtttagcgctgaatattttttctcggcatttgctgcggcagtgtcaggttctgccaatgctgccccggtaaagagcaggacaaggcctccaatgaaaagcggccaaaaaagtctcttggagaaacgtttttcctttttcagtacatatttgacaaggtgatataatccatagcccagtgcaatgagacatgccagaaaacctaagaatgctaataccatttccataatatgacccctttttctatttattttacatttttcaaacaatatttgttagattttttcacgctcatcagttgaaaaatgtgagagagacagatagaatgaatgtgctatgataactggattcgtacggagccgttttaggtttcgtttttttcatgagcttttttaggtaagaaagggggatgagtatgccgcgtgctcttaaaattttagtcattggaatgtttatcaatgtgacgggtgcttcttttttatggccgctgaatacgatttatatccataatcatttaggaaagtcgttaacagtagccggacttgtcctgatgctgaattccggcgccagtgttgctggtaatttatgcggaggttttttgtttgataaaatcggcggttttaaatcgattatgcttgggatagccattacgttagcaagcctcatgggtcttgtcttttttcatgattggccagcctatattatgctgctgacgattgtgggctttggctctggtgttgtttttccggccagctacgcaatggcgggatcggtatggcctgaagggggaaggaaggcatttaatgcgatatatgtcgcgcaaaacgcaggtgtggctgtcggttcagcgcttggcggtgtcgtggcgtctttctcgttttcatatgtatttttggcgaatgccgcgctgtatctggtctttttctttattgtatatttcggatttcgaaatattcagacgggagatgcctcccaaacgtctgtgcttgattacgatgctgtgaacagcaaagcaaaatttgccgcgctcatcattttaagcggaggctatgtactcggatggctggcttattctcaatggtccaccacaattgcttcgtacacacaaagcattggaatatctctttccttatacagtgtgctctggacggttaacggaattctcattgtgcttggccagccgcttgtcggttttgtggtgaaaaaatgggccgagtctctaaaagcgcaaatggtcatcggctttatcatttttattgtgtctttcagcatgctgctgactgcaaagcaatttccgatgtttctcgctgcgatggtgatcctgacgatcggagaaatgcttgtttggcctgctgtgccgacaattgccaatcagcttgcccctaaagggaaagaaggcttttatcaaggctttgtcaacagcgcggctacaggcggcagaatgattggccctctgttcggaggagtgcttgtcgaccattacggcattaaggctcttgttttatcattattggtattgctgctgatcagtattgccacaacgcttctatatgacaaacggctaaaatcagctaaagaaacaaataagcaggcatcaatctcttcataataaaagatcccgctgggtgagcgggatctttcagcgtgtcgacaaaccctcgcattcgttgtcaggcctgcgcttcggtgctcacgaattagaacattcgctccgctcctatgctcgtccttcctagacttcaagggttttcaatcacgctgaaaagatgacaaaatcctaaaatgaaaaccattttaggattttgtcaacaatctgaaagatcccgccggatgagcgggatctttttacataatcggaagcacgttaacggcatcctttacatttgaatatgttttcagcgacgaaaaattggcatccagtttattcattttcatggccaattcaggcttaatgccggtaatgattaactcagttccggtcaatttcagcaaatggctcagcttgaaaatttggtcggccgtttgttcgttcacttgggccaatccggataaatcaatgatcaaataatcatctttggatgttgataagatattcgtcaatgtgcaaacaatggaattaaatcgctcctctgtcaggtttccgactagcggaagagccgaaatgccattgcgaatcgggacaataggagttgaaagtgcagtaatttccgtgagggaatcctcgagaagcttttcatactctttttgcttggtgatgtctttctgaattccgacaaaatacgttttatcctctatttccattggatcaatatttaattcattccagaacatcgttccgtcttttttgtagttttgaatctgaacggtgaccggttctttattttgtaaagcggttctgatgttgtccacttctgcaggatctgtgtgtttcccctgtaagaagcggcagttctttcctaaaatttcctcggtctcgtagccggtcatttgaacaaagccttgatttacgtagataataggattatcttcaagtgcgggatctgtaattaccacaccgactcgcacgtgatcaagcgcttttttgatgacttccagctgtcctggtatcccaaatgattgaaaactagccatataaatcccccttaggccgtcagcttgctatgcgaaagcctgatattcccctttttaaaatgaattctacagtaaccgtagcacaacacatgttctgattcaagcaagtgcagtttgttgtttgtcattagggcttgtcctcgtatacactaaaaataagaacagaatttgaacatatgaacggaaaggttttctacatgctaaataggtgactaggtcaatgtcactgggtgaaaaatgaatccaatgcatcaagcttaccgatcatgtgttcacatataatggaagaaacaagctttttacagatttgccggtatgtagatatcgaaaatcatcggaatcgtttaagggggctggatggcctgaagtcgctttacgaaataagggctttaggaaggtgatgatgaagatgctgcatcaggtactcattgcttgtgtaattggaggaatcatggggattctcggtcatgtgaaaaagagaggcaggctggagaagcccagaatgacgaagcggtttatctaccttggatttttggaagattggtttatcggcatgacggcttccattttacttgtattatccgctgaccccgattcaggaattcaacttgtcatcttatccattatctcaggctacggcggtgaagctgttctcagaagttttgactttgtgagagaactgaacagcggcggcgaaccggccgagtccaaacgtcaaaccaaaactccacccgaataattgtcctcaatctccgcccgttcagggtacattcccattgtatacaaacctgcttgcacttatgaacagaattctataaaatacagttagattacggttgcgataagaacaatgaagaggagcagtaagaaacagatattgttgcagagagttgacggctggtgaaagtcaatcaagtttgtttccgaactcacctcagagttgcagcggtgaaaagccgctgacgcataactgcgttaaaagtatcaagtgagtgcggcgtatgccgcgctaacgagggtggtaccgcgggaaaacgaaagtctctcgtcccttttagggatgagggagttttttttagtttgggaatattctgaataatcctctccttcccgtcaatacttgaaccatacacgccgtattcaatcagaaggaggtttttactttgagttttcagcacaaagagatagaaaagaaatggcaaacatattggcttgaaaacaaaacatttgccactcttgataataatgaaaaacaaaaattctacgcgctggacatgtttccttacccgtctggagctgggttgcacgtcggccatcctgaaggatacacagctacggatattctgtcccgcatgaagcgcatgcagggctatgatgtccttcatccaatgggctgggacgcattcggcctgccagctgaacaatacgcgcttgacacagggaacgaccccgctgtgtttacgaagcagaatattgataacttccgccgccaaattcaagcgcttggcttctcatatgactgggatcgcgaaatcaatacgactgaccctgaatactataaatggacgcaatggattttcttaaagctatacgaaaaaggccttgcttacgttgacgaagtgcctgtaaactggtgccctgcgctcggtactgttcttgccaacgaagaagtcattgacggcaagagcgaacgcggcggccatccggtagagagacgcccaatgaagcagtggatgctgaaaatcaccgcttatgcggacaggctccttgaggacttggaagagcttgattggccggaaagcattaaagatatgcagcgcaactggatcggccgttcggaaggcgctcacgttcattttgctatagatggacatgatgattcctttacggtgtttacaacaagaccagatacgctgtttggcgctacatacactgtccttgccccggaacacgcattggtggaaaacatcacaacggcagagcaaaaagaagctgttgaagcttatatcaaagaaattcaatcaaagagtgacctagaacgcacagatcttgcgaaaacaaagacaggcgtatttacaggagcgtatgcgatcaatcctgtaaacggagaaaaactgccgatttggattgcggattatgttcttgcatcatacggaacaggtgctgtcatggcagttcctggacacgatgagcgtgattttgaattcgccaaaacattcggccttccggtgaaggaagtcgtaaaaggcgggaacgttgaggaagcagcctatactggcgacggcgagcacgtgaactctgatttcctgaacggccttcacaaacaggaagcgattgagaaagtgatcgcttggctggaagaaacgaaaaacggtgagaagaaagtgacgtaccgtcttcgtgactggctcttcagccgccagcgttattggggcgagccgattccggtcattcattgggaagacggaacgtcaacagctgtccctgaagaggagctgccgctgattttgccgaaaacggatgaaatcaaaccgagcggaacgggcgaatcaccgcttgcgaacattaaagagtgggtggaagtcacagaccctgagacagggaaaaaaggaagaagagaaacgaatacaatgccgcaatgggcgggaagctgctggtatttcttgcgctatattgatccgcacaatccggatcagctggcatcaccagaaaaattggaaaaatggcttccggtcgatatgtatatcggcggtgcagagcatgccgtgcttcaccttctgtatgcccgcttctggcataagttcctttatgatatcggtgtagtgccgacgaaagaaccgttccaaaagctgtacaaccaaggaatgattctcggtgaaaataacgaaaaaatgagtaaatctaaagggaacgttgtcaaccctgacgaaatcgtgtcctctcacggtgctgataccctgagattgtacgaaatgttcatggggcctcttgatgcttcaatcgcctggtctgaatcaggattagacggtgcgcgtcgtttccttgaccgtgtatggcgcctatttgttgaagaaaacggtgagcttaatggcaaaatcgttgaaggcgctggtgaaacattggagcgcgtctatcatgaaacggttatgaaagtcacagaccattatgaaggccttcgtttcaacacgggtatttcccagctgatggtctttattaatgaagcttataaagcaacagaactgccgaaagaatatatggaaggcttcgtgaagcttctttctcctgtcgcgccacacttagcggaagagctatgggagaagcttggccattccggcacaattgcctacgaagcttggcctgtatatgatgaaacaaaacttgtggatgatgaagttgaaatcgttgttcagctgaacggaaaagtaaaagcgaaattacaggttcctgccgatgcaacgaaagaacagctggaacagcttgctcaagcagatgaaaaggtcaaagagcagcttgaaggcaaaacgattcggaaaatcatcgcggtgcctgggaagcttgtcaatattgtggcaaactaagcctagaaaaaatcccctttgccaaaaggggatttttttcatcagtctcagaatagcaatcgttcagctgactttgatatactgaacatgatcactgtgaataggagtgttttctttggaaataaaagaaatcagcacagccgctttgaaagaaaaaattgaggcggacgaagaattatatttaattgatgtcagagaagatgaagaggtagcggaaggcatgatcccgcaagccgttcatattcgcatgggggaaattcctgaaaaaatggaaacccttgataaagacaaagagtacgtatttatctgccgctcaggaatgcgcagtatgaacgtctgcaagtacctggatgagcaaggctttaaaacagtcaatgttgaaggcggcatgatggcctgggaaggcgaaacaaaaccaaaaaactaggggagagcggtcccctagtttttatttgtattccggaagccaatcgccgtgtgctgcaaataaatcgtcacacatggagatgatgtccttcatggaaagctccgcgcttgtatgcggatcaagcattgcagcttggtaaaccgcttctttttttcgtgtgacagccgcttcgattgtcatcagctgtgtattaatattcgttcggtttaaggctgcaagctgctcaggcagttctccggcgaagcacggtgtaattttttttctgtcggcgacgcatgtcacttccacaaccgcttttgaaggaaggttggtgatcagccctgtattcaagacgtttcctccgaaggtgaatggttcgtttgtttccattgcttctataattcttgaaccatattcctttgagcgttcgtgcgtaaggtttttattattgacgatatcatcccgcattttctcccaattttcaatctgcttgacgcaccttctcggatattcgtcgagcgggatttgcagctcgctgatcagttcagggtaattccgtttaataaagtatgggtgatactctgcgttatgttcggacgattccgtgacataatagccgaacttatccattaattcaaaccgcaccatatcatgatgctttgttttttgtttttctttcgctctccttttgatttctggatataaatctgtgccgtcttttttgacttccaaaagccaagccatatgattaatgcctgcgatgcgttcctcaattccgtcatgctccattccgagagctttaaataaatccttcgtgcacacttgaacactgtggcagagcccgattgttttgatattggtatagcggagcatggcgcctgtaagagtggccattggatttgtatagtttaagaaccatgcgtcagggcacatttcctccatatcttttgcgatatcaattaagaccgggattgttctgagagatctgaatatcccgccgatgccgactgtatcggcgatcgtctggcgcagcccataccgtttaggaatctcgaaatcgatgactgtgctcggtttgtatcctccaacctgaatcgcattgatgacatagcctgcgttttgcaaggcgagttttctgtcatcatagctgttgatggccacacttgggttataacggtctcttagattttcgagcatgagctgggattcctgcaggcgtttgggatcaatgtcgtaaagagcgaactcaaatccattcagtgcctctgttaataggcagtctcccaaaacatttttggcgaaaatcgtgctccctgcaccgataaatgtaatctttttcatattgcttcctcctttaatgttaaccctttaccgctccggaagacaggccggcaataaagtatttttgcagcgccaaaaacagaacaaccatcggcagcattgccataagtgccgctgcggcaactaaatgaaggttgtttgcgttttctccgaaaaaacctgccatggctactgttaatgtctgaaccttttgatcttgtaaaaagaaaatggcaaattgatagtcgttccaaataaagacacaagaaataatacagatggtcgcagtgatcggcttcagcagaggaaacacaatcgtaaaaaagattttcagcatgcctgcgccgtcaattcttgcggcttcttcaagctcttttggaatggtcgatcggataaagcctgaatataagaatacggttaaaggcatgtaagccgctgtattgatgaaaatggcgattgcgtgtgtattgaccattccggcgtccacgaccattcggtacaaaggaaccatggacgttaacggagggatgatcataatggaaatcagcaaggcaaaaacggctttattcagtttcgtttcccgccgggcaagcgggtaggcggcaagtgagccgaatataattaataacaaggcagaaaaacctgtgatgatcatggtgtttataaaagagtttcctagcgaagcgcgctcccacgcctctgaaaaattatgaaaggagatgtcggctggaaatatccatttcgaactgtagtctccttttgctttcaatgaagtggtcagcaggatataaaaaggaataaaatgcgcacaggccacaatggctgcaagaagcgtaatgatccgcatgctttttgtacgggcggctctcatgacatttccgtctcctttcttttaaagtacgcaagtgcgcaaaagctgatgatcaaaatgacaaaagccataaatatgccttgcgttgcggcatagccggcatcctgccgtttgaaatacaaatcatacataaacgtggacatggattgtgacgcatttccgggtccgcctgcggtgagtgcaatgatgacgtcaaacagctttaagcctccgataatgttgatgaccatattaatggtaatggagggcattaacagcggcagcgtgatggtaaaaaactgctggccttgtttcgcgccatccatttgcgccgcttcatagtagtctttcggaatgctttgcagaccggctaagtagacaaccatagcgatcccgacatattgataggtgttaatcatgacaatgatccatggattgagcgagggactggcgagcgcattaatagggctgatgccgaagacccagagcaaatcgttgagcgcgcctccatcataggagaagaaaaagtaccaaatgtagcccataatgagcgggctgatcatcaccggcaaatacacaattgttcttgttaccgctttcgttttaatgctttgatttaagagcagagcgtacagaagcccgaccacattttgaaaaaaggtgctgccaagcccgtaaagcagcgtgttttttaagatatgccaagtgtcaggatcagaaaacagcctttcatattgcgcgaatccaacccattggtagacttgtgaaaagccgttccagtttgtaaaggtaatcaatgtgcctttcataaacggataaatcataaagaccagaacggagagcaaagcaggaatgtacatccaccaaagtgaggactgtttttttggcttaacctgtttcacatgaacgtcccttgcgatctcactcattgttttcagctccctgtgtttccgattgctcccggagtcgtttatattctcttcccagcttctgcgaaatgtcttgaggcgccaaaatgtcagccgccagctcctgtccgaccgtgcccaggacatcccacattccgtttggcaagtataaacggtcgaagtaaggctcgactttgacatcttgataatgctcataatcgtttgcgtagaaaatatcagctttcacattggtcagccctgaaggaagcgatgtggcttcagccatttgtttggcattggccgggcgggccataaatgagataaattcttttgcctcttttaattgaggcgaatctttccatgctgcaagggtgtagcgttcaccgccgatccatatcgggtcatcaccgggatggatggcaggtgtcgggataatgccgaccttgacgttcggattgatctgggcaacgtcttggccgagtgtgccgccttgcattgtaaaggcgattttgttttgggccattaattcaatgagctgtgatttttttgccgttacggcgtcgatattgattaatttttctttctgcatttgtttgaggatttctgataaataagtgaatttactccattgaaaagtgccgttgatgagctgttttttttcattatgggcagggtctgtgatgagaagaggtgtagcgaattggtcgtaatattgagcgaatgagcttttgtcatatccggcaaaccagaagggaacaatgcttcccttgctcttttctttaatcgttctcagtgctttgataaagtcatccatggtttccggcggagcaatgccgtaacggtctaaaatattgcggttatacgccaggccgtcttttgcctgattgaccggataggcatacacctttccgcttttatttttgaggatgctgtttaaattaggatcaagatcttgagtccattccatatcccggagatccgctgtatattctccgtacctgattttcccccagccatgtgtatcgaatagatctggcaaatcattggccgccattctgacacgcattatattttcatagtcattgcctgggaaatgaaggctgacacgaatgtcactgtgttccttttcgaatgttgctgccagttttctgaacgtatctctttcactgtcggttgacattgtagaataaatggttaacgtcttttttgcggtatctgctgagcttttctctgctgaacacccgggcagaacaagcagaataagagagagaaataaaacaaaagtgtgtttcatcttttcctccttatcatcgtgatgaatctttgcttatgtcacctcctttactgtacatccgcagctttgtcttacgattaatgttgtaggcagggtgacatggtgaggaagcgttcggccattgagacggtcaagcagcagttttacgcctgtccggcccatttcctctgtgtataccttcaccgtcgttaaaggcgtgctggcaaattcagcttcctcaatgccgttaaagctgacgattgcggtatcccgcggcacttgcagtccggcttcctgcagcgcttttaatgcgccgatcgccatagaatcgctggcaataaagaatgcttccggcagatggccttgatcgattgctttcttcatcaggcgatagccctcacgcatgctgtattctccgatcagcacatgctcaggctggggggcggctgactccaaaaaagcggtcaggcgtttatcttcaatcgttctgcgaatgctttggccgtccttcagcgtatgctctttttcttgtccgccaatgtagcctaaccgtttgtagcctaagtcgaaaaggtgatcaatcgcctggcgtgaagccgattcaaaatcgattccaatcgaatcgtatgcttgcggatctggtgaatgattgataaatacagcatgctccagccttccgctgatatgcttaaccgcttcatcatgaacacggccgatgacaatgacaccatccaattcccgaaagatatgttcctgaaaggagccgagatgaattgaatttgtaatgaaaatttcctgttcaaagcattccttttcaatccctttccgaatggaagaaaaataagggtcctgcctttcctgatcaggggacagacagctcagcacaccgatcagcggctgggcccgctgtttttgcccgcgggcttttcggcgtttggcaacggtttgataaccaagctcttcagcgatgttgatgactctttgtctcgtttcgcccgcaacagaaagcgactcatcttcatttaaaattctggacacagttgcgctggaaactttagctttcaaggcgatatctttaatacgaaccatgggtatccctctcatctatttagtaaaatattaactcatctgtttttgataaattgatactatcatataaaagtaagcggttacaataattgttttcgaaatattccataatatttactaaatatttagtaaatgatgtgatttatgttggaaaaataaaggggaacccagaatctgtctcgtaaatgtgaagtaagcgaataaggaagggtgatgggatgagagccgaaagaagaaagcaactgtttcgattgcttggtgatttgcctgatcggaggccaatcagtgttgagacattacatattgaagaaagagaagaaaatatcgttgaaacgctcctgctcgatttaaatggacatgaaaaggtgcccgcttattttgtgaagccgaagaaaacagaaggaccgtgcccagccgtattgtttcagcattcgcatgggggccagtatgataggggaaaaagtgagctgattgagggagcggattatttgaaaacgccttctttttctgatgagcttacttcactcggatacggcgttcttgcgattgatcattggggatttggagatcggcggggaaaagcggaaagcgagatatttaaagaaatgctcctcaccggaaaagtgatgtgggggatgatgatttatgacagtttaagtgcgttagactatatgcagtcacgctctgatgttcagcctgacaggatcggaaccatcggcatgtctatgggaggtttgctggcgtggtggacagcggcgctcgatgaccggattaaggtgtgtgtggatttgtgcagccaggtggatcatcacgtgctgatcaaaacacagaatcttgacaggcacggcttttattattacgtcccatcgcttgcaaagcatttttccgcatcggagatccaaagcctgatcgcgccgcgcccgcaccttagtcttgttggtgtacacgatcggttaacgccggccgagggcgtggacaaaatcgaaaaagaattgacagctgtctatgctggacagggagctgctgattgctaccgagtggtccgttctgcttcgggacatttcgaaacagcagttatgaggcatgaagctgtccggtttttgcaaaagtggctgtgactgtaaaaagaaatcgaaaaagaccgttttgtgtgaaaacggtctttttgtttccttttaaccaactgccataaatcgatcctttcttctattgacagaaacaggagagaataatatattctaattgttaacctttgaatataatcggttaacaattgaggtgagaagcactacacgttcttcagttatcagtgaaagggcgagaaatgatgcaagaagaaactttttatagtgtcagaatgagggcttctatgaatggatctcatgaagacggcggaaagcatatatccggcggagaacggcttattcctttccatgagatgaagcatacagtcaatgctttattagaaaaagggttatcccattcaagaggaaaacctgattttatgcaaattcaatttgaagaggtacatgaatcgataaaaaccattcagccattgcctgtgcatacgaatgaagtgagctgcccggaagaaggacaaaagcttgcccgattgttattggaaaaagaaggcgtttcacgagacgtgattgaaaaagcatatgaacaaatccctgaatggtcagatgtcaggggtgcggtgttgtttgatattcatacaggcaagcgaatggatcaaacaaaagaaaaaggggtgcgggtctccagaatggattggccggacgctaattttgaaaaatgggcgcttcacagtcacgtgccggctcattcaagaataaaagaggcccttgcgctcgcttcaaaggtaagctggcacccggcagccgttgcagaattatgctggtcggacgatccggattacataacaggctatgttgcgggtaagaaaatgggctatcagcgtattacagcaatgaaagaatacgggactgaagagggctgccgagtcttttttattgatggatccaatgatgtaaacacgtacatacatgatctggagaagcagcctattttaatcgagtgggaggaagaccatgactcatgatttgatagaaaaaagtaaaaagcacctctggctgccatttacccaaatgaaagattatgatgaaaaccccttaatcatcgaaagcggaactggaatcaaagtcaaagacataaatggcaaggaatactatgacggtttttcatcagtttggcttaatgtccacggacaccgcaaaaaagaactagatgacgccataaaaaaacagctcggaaaaattgcgcactccacgttattgggcatgaccaatgttccagcaacccagcttgccgagacattaatcgatatcagcccaaaaaagctcacgcgggtcttttattcagacagcggcgcagaagcgatggaaatagccctaaaaatggcgtttcagtattggaagaacatcgggaagcccgagaaacaaaaattcatcgcaatgaaaaacgggtatcacggtgatacgattggcgccgtcagtgtcggttcaattgagctttttcaccacgtatacggcccgttgatgttcgagagttacaaggctccgattccttatgtgtatcgctctgaaagcggtgatcctgatgagtgccgtgatcagtgcctccgagagcttgaacagctgcttaaggaacatcacgaggaaattgccgcgctttccattgaatcaatagtacaaggcgcgtccggtatgatcgtgatgccggaaggatatttggcaggggtgcgcgagctatgtacaacatacgatgtcttaatgatcgttgatgaagtcgctacaggctttggccgtacaggaaaaatgtttgcgtgcgagcacgagaatgtccagcctgatctgatggctgccggtaaaggcattacaggaggctatttgccaattgccgttacgtttgccactgaagacatctataaggcattctatgatgattatgaaaacctaaaaacctttttccatggccattcctatacaggcaatcagcttggctgtgcggttgcgcttgaaaatctggcattatttgaatctgaaaacattgtggaacaagtagcggaaaaaagtaaaaagctccattttcttcttcaagatctgcacgctcttcctcatgttggggatattcggcagcttggctttatgtgcggtgcagagcttgtccggtcaagggaaaccaaagaaccttacccggctgatcggcggattggatacaaagtttccttaaaaatgagagagttaggaatgctgacaagaccgcttggggacgtgattgcatttcttcctcctcttgccagcacagctgaggagctcacggaaatggttgccattatgcaacaagcaatccacgaggttacgagccttgaagattgattcctggttgaacaagcggttagacagaatgaaagaagccggcgtacatcgtaacctgcggtcaatggatggagcgccggttccagagaggaacattgatggcgaaaatcaaacggtctggtcctcaaacaattatttagggctcgcaagcgatagacgtttgatcgatgcagcccaaacagcattgcagcaatttgggacaggaagcagcggttcacgtttaacgacaggcaattcggtctggcatgaaaagctagaaaagaagattgccagctttaagcggacagaagcggccctgctgttttcgagcggttacttggccaatgtcggtgtcctttcatccttgccagaaaaggaagatgtcattttaagtgaccagctcaatcatgcaagtatgatcgacggctgccgactttctaaggctgatacagttgtttatcggcatattgatatgaatgatcttgaaaataagctgaatgaaacacagcgttatcagcgccgttttatcgtaacagacggggtattcagcatggatggcacaatcgcccctcttgatcagatcatctcacttgcgaaacgctatcatgccttcgtggtcgttgatgacgcccacgcaacaggagttttaggcgattcgggacgaggaacgagtgaatactttggtgtttgtcccgacattgtgatcggcaccttaagcaaagctgttggcgcggaaggaggttttgcggcaggatcagcggtcctcatcgactttttgctgaaccatgccagaacatttatctttcaaaccgctattccgccagccagctgtgcggctgctcacgaggctttcaacatcattgaagccagcagggaaaaacgacagcttttattttcttatatcagtatgatcagaaccagtctgatgaatatggggtatgtggtgaaaggagatcacacaccgattattcctgtagtcattggcgatgcccataaaacggtcctatttgctgaaaaactgcagggcaagggaatttatgctcctgccattcggccgccgaccgttgcaccgggtgaaagccggattcgaattacaatcacgtctgaccacagtatgggtgatattgatcatttgctgcaaacatttcattcaatcggaaaggagctgcacatcatttgaggggtttttttgtgacaggaacagatacagaagtggggaaaacggttatatccagcggtcttgctggcttattgaaagaacataatagagatgtcggtgtgtataaaccatttttaagcgggatatcgcgtcatcatccagatagtgatacaagtctgctgaaagacatgtcgcagaccagtctttctcatgaagacattacgccttttgccttcaaagcgccgcttgcaccatacgttgcagggaaacttgagggaaagactgtcaccatggaagaggttttaagccattgggggcggattagagaaaaacatgaatgcttcatcgtagaaggtgcgggcggtatttctgtgccattgggagaggactatttggtcagtcatgtcataaaagcgttgcagcttcccatgattattgtggcacgtcctcaccttggaaccattaatcatacctttttaactgtcaaatatgcagaaagcatggggcttccaattgccggaattatcatcaatggaatcagtgactctcctgatgaagatgaaaaaaccaatcctgagatgattgagcgcttatgcggtgttccgattttaggggttacgccaaagcttgccaacgtgacgaaagaaacggttctacatatggtaaaagaccatatcaatctatcattactgatgaatcaagtgggggtatgagaatgaatcaatggatggaactcgcagaccgggtgctggctggagcagaagtgactgacgaagaggcgctttcaatattacattgtcctgatgaagatattttgctattaatgcatggagcttttcatatcagaaaacacttttatggaaaaaaagtaaagctcaatatgattatgaatgcgaaatccgggctctgcccggaaaactgcggctattgttcacagtctgcgatttcgaaagcgccgattgagtcttatcggatggtgaataaggaaacgctgcttgaaggcgcgaagcgggcgcacgatctgaatattggcacatattgtatcgtggcaagcggcagagggccgtctaacagagaagtggatcaggtcgtagatgcggttcaggaaattaaagagacgtatggactgaaggtttgtgcgtgtctcggactgttgaagccagagcaggcgaagcgtctcaaagatgccggagtagaccgctataatcataatttgaatacgtcacagaggaaccattcaaacatcacgacctcacatacatacgatgacagagtcaatacggttgaaatcgcaaaagaatcggggttgtctccgtgttcaggcgccattatcgggatgaaggagacgaaacaggatgtcattgacatcgccaaaagcttgaaggctcttgacgcggattccattcctgtgaattttttgcatgcaattgatggcacgccgttagaaggcgtcaacgaattaaacccgctgtattgtttaaaagtgctggcactgttccgttttatcaatccatcaaaagaaattcgcatttccggaggaagagaggtcaatctccgctcattgcagccattagggctttacgccgcaaactccatttttgtcggagactacttaacaactgccgggcaagaggagacggaggatcataaaatgctgagtgatttaggctttgaagttgaatcagtcgaagaaatgaaggccagtttaagtgcgaaaagctgaaagaatcaataaaagcaatcggtatgatgtcgattgcttttatttttgaacagaaaggagaaaatcacgtgacaattgcatcgtcaactgcatcttatgagtttttgaaaaacccatattctttttacgacacattgcgagctgttcatcctatctataaagggagtttcttaaaatatccgggctggtatgtcacaggatatgaagaaacggctgctattttgaaagatgcgagattcaaagtccgcaccccgctgcctgagagctcaaccaaatatcaggacctttcacatgtgcaaaatcaaatgatgctgtttcagaaccggcctgatcatagacgattgcggacgcttgccagcggagcgtttacgccgagaacgacagagagttatcagccgtatatcattgaaactgtccatcatttgcttgatcaagtgcaaggtaaaaaaaagatggaggtcatttcggactttgcttttcctttagcaagttttgtcatagctaacattataggtgtaccggaggaagatagggagcaattaaaggagtgggctgcgagtctcattcaaacgattgattttacccgctcaagaaaggcattaacagagggcaatattatggctgtgcaggctatggcatatttcaaagagctgattcaaaagagaaaacgccaccctcaacaggatatgatcagcatgctcttgaaggggagagaaaaggataagctgacggaagaggaggcggcatctacgtgcatattgctggcgatcgccggacatgagacaacggtcaatctcatcagcaattcagtcctttgtctgctgcagcatccagaacagcttttgaaactgagagaaaatccagatcttattggtaccgcagtcgaggaatgtttacgctatgaaagccccacgcaaatgacagccagagttgcgtcagaggatattgacatctgcggggtgacgatccgtcaaggagaacaagtctatcttttgttaggagcggctaatcgagaccctagcatattcacgaaccccgatgtcttcgatattacgagaagtcctaatccgcatctttcattcgggcatggccatcatgtttgcttagggtcctcgctggcacgattagaagcgcaaattgcgattaacactcttctgcagcgaatgcccagccttaagctcgcggattttgaatggcggtatcggccgctttttggatttcgggcgcttgaggagctgccggtgacttttgaataagcctaagaatgtgagtgccaaaaaagtgtcagccccgccgaaaatgggcaatctataaaaaaggggagtgaacatagtgaaaaaagtgctgatcgccggcggaaatggtgtgattgggagactgcttgctgaagggcttatttcagactatgaagtgactgtgcttgataaatatcatttcgatggcaaagcctcttccattcaggctgacgcggcaaattatgaggagctgttgaagaagattccaaaagatacggatgtcatcttgaatttactcgctgttaaaatcaaatacgatattatggacatcgctgagtttgaaaaaatgacggatgttttctatagggcaagctattatctgtgccgtgcggcagcggagctcggcattcaaaagctcgtgttcgccagcagcaatcatgtcacagatgtatatgaaaaagacgggcgctcgctcttaggacgggaaatcacaacaagcgattatccgctgtcaaaaaacttgtacggtgtattaaagctgacctctgaacagatcggccatttgttttatttggaaaataagctatcagtaatcaacctgcgaatcggaacagtcgtcacagatgaaatggatacgctgcatgaaaaagaacggacgaaaaagacactgctttctcaccccgatctgctgtcgattttcaaagccgctattgagaccaatatccggtacggcacttattacgccgtctctgataatccgggccggccatggtccattgaacctgccgtgaatgaacttgggttttcgccacaaatcaatacggccgaacttctgaacgaggaggagaacggagcataatcattttctaagattatgctctttttcttttgttatcggtctcaattcgcggcagcccccgccccggccggggactctgttcaaatgattatagacatggcaatcacagatttgctacattttagacacgatatcgtcacatgctgagctcggtttttaaaaatatgataacgcttacaaagagaggtgggagctatcgcacattcactgaaaaaccgtctgtttgatatgttgatttatggtttcttgctgatgttcgctttaatatgcgtacttccgttcattcatgtcatcgcagcatccttcgccacagtagaagaagtcgtgtcgaaaacatttattttaataccgaccactttttcgctagatgcttatcgctacattttttcaacagatattatttataagagcttgcttgtttctgtgtttgtgacagtgataggcactgcggtcagcatgtttctttcgtcactgatggcttacgggttatcccgccgtgatttaatcggccggcagccgctcatgtttctcgtcgtatttacgatgctgtttagcggcggcatgattccgactttccttgtggtcaaatcgcttggattgctcgattcttactgggcgcttattttgccgactgccattaatgcctttaacctgatcattctgaaaaacttctttcaaaatatcccgtcaagcttggaagagtccgcgaaaattgacgggtgcaatgacctgggcatattctttaaaattgtgctgccgctgtctcttcctgcgatcgcaacgatttcactattttatgcggtcacgtattggaacacgtatatgacagcgatcttgtacttaaatgattcagcaaaatggccgattcaggtgctcctgcgccaaatcgtcattgtatcaagcggtatgcagggggatatgtctgaaatggggtcgggcagcccgccgcctgagcaaaccattaaaatggcggtcatagtggtggcgaccatcccggttctgcttgtctatccgtttatacaaaagcattttgcaaaaggagctttgctgggatctgtcaaaggataaagaaatatgaaacggaggggtacgatgggaaacaaatggagggtgcttttgattgtgcttgtactggcactcggcggagtgctggcgggctgtaaaggaactgatcagtcttcggctgaaggcaaagctggcccagattcaaaggtaaagctgtcttggatggcgattttgtatcatcagcagccgccgaaagacagggcgattaaagaaattgaaaagctgacaaatacagaacttgacatcacctgggttccagacgcggtgaaagaagacaggctgaatgcagcgcttgcagccgggaatcttccgcaaatcgtgaccatccaggatattaaaaattcgtcagtcatgaatgccttccggtcaggaatgttttgggaaatcggcgattatatcaaggattatcccaacttaaacaaaatgaacaaactcattaataaaaatgtcacaattgatggcaagctctacgggatatacagagagcgcccgctttccagacaggggatcgtcattcggaaggactggctggacaatttaaatttgaaaaccccgaaaacgttggatgaactttatgaagtggccaaagcatttacggaggacgacccggacaaggatggggaagataatacgatcgggctgacagaccgtaatgacttgatttacggtgcgtttaaaacgattggctcgtatgaaggcatgccgacagattggaaggaatcgggcggcaaattcacgcctgatttcatgacacaggaatacaaagacacgatgaactatatgaaaaagctgcgtgataacgggtatatgaataaggattttcccgtcacaagcaaaacccagcagcaggagctgttttctcaaggaaaagccggaatttatattggcaatatggtagatgcggtcaatctgcgcgaccatgcctctgataaatcgatgaagctcgagatcatcaaccgcataaaaggcccagatgggaaagagcgggtatgggcatcaggaggccataacggcgtgtttgctttcccgaaaacgagtgtgaaaacggaagctgagcttaaacggatcttggcgttttttgaccgaattgccgaagaagatgtctatagcctgatgacttatggcattgacggcgttcattacaacaaaggtgaggacaaaacgtttacacgcaaagaaagccaggtaaaagactggcagactgatattcagccgctgtccgctttaattgccattgataaagcctacttaaaaaacactggagatccgcttcggacggcgtacgaggagctgaccgaggataacgaaaagattatcgtctcaaacccggctgaaagcctgtattccgcatcggagtcggaacggggtgatgaactgaagaaaatcattgatgacgcgacctataaatatatgattggagacatcacagaaagccagttcgataaagaagtggaaaaatgggagtcaagcggaggaaaacaaattattcaggaatacgaagaagcgtttaaacaagcaaaataatgttggaaaaacccaaaacgcgcaagcggttttgggttttttacatgcttcttttttgctggcggtagtttcccggtgtaatcccctccagctttttaaaagacctgataaaattttgcgagtttttatatttcagcttttcggcaatgtccttgaccgccatgtctgtttcggcaagccagcttttcgccatatggtgtcggtagcttgagacatactcgctgaatgaaattcccatttcttttttgaaaatgctgcttaaataatttgggttgtaatgcagcctgcgcgcgatttcgtccagtgtcaattcggattcaaactcatgatggatgatatgaatgatgttgtcggaaatatttttgtactgggcatccgcgcgggcgttcactttgtctgtcatcggatcaataaactcattctttagccagttttcggtatcctcgaacgttttcagctcaaaaatttggtcatacagcattttgttttcttcaagctcaaacaattcgatcccgagcacatgcatcagctcaatcacatggttcaaaaaacgggcgatggcgatttgaaattgatacgggttggtgttctgggtgaagatggcttgcaaaatcgcgtgcaggcatttatccgctttctccttgtctcctgctttaacggcatcgaacagctcatgctgaagctgctttggaaaatgggttttgaaggtttttttctggtcaaggtcttcgtaaaagatgatcgacttgttttccgctttaagccggtatttcaacgcttctgagccttccgcataggctgttttcgcttttgtcagcacatcaaacggctggctgatgccgatgctgacagacagctgcagctcagcttccgctttttcctgaatcatccttgcagtctcattcagctcagccatgaattcttcctttgtcccgctttgattgattaaaatcgtcgcctgttgtttgtcaactacagcgggggcaagatgtttgtccgtcgggatgcatcgctcaatcaggctgttgacggcaaacaaaagcagatccatatcttttttctcataaggcgtatgattcagtgtgtcaatttggagcacaagcagggcaaggtgccgccaattttgctttaagccgaggctttcaaaacggttatcaacctcctcatccgtcagttttccaagcataagcctgaccataaaatattgctgcagatgagtggcctgctgcttcatcgtttcctcaaggtcgtcatttctgtccttcagctgcttaaagctctgttcaattaactcaaattcattttgaggaggctgctgtttctcttgtatggctccatgtcttgcgaatgattcgtaaagcaccctgatcggcttgtaaaaatggcgggagcccagccaagagaataataatgaaagcgttaacaaaataagacatactgcaaaagtgatccagccgattgatttggcttctttttttagctcgggcagggaaacgagagaaaaataagtccatgtattatagtcagatttttgataggtgactttataatgaatccggtcaatcactgtttcaaactgtccgctattggcgttttgcgccagcactttttggacaaagccgtcgttatgaagagattcaccaatgtcagacatgttgttatgaaggataatgcggcctttttcatcgatgataaacaggttgttggcgtttgaatagctaggcatatttttgacaagcgaacagctcggaatgcttgcggcggccaatccctttgtatttgtgctgttcaaaggaagctgcttaattaaattgatattgtagcggcagttttctgctgtgccttctttggttgaaatcaaatgattgttttcctcaagcgtccaataggagcggctcgctttttgtttcgtgtacgctgaggctgcttcatgaagagtgtctgtattcaaacggtacaaaccggaattgttcatgtaccattttttcgtataactgactaacgtcatgttggacagatcggtatcaaagctttgcagataattgagctcttggttcacttggttatagatttgaaattggtctgagtgcaaaggctcggacaatgtgcgaaggagaggcggcgaactcacatagtgggttaaagagtgatcgacggttttcaatatatgctcgatgctttgctgggtctgctggagtgtgtcgaatttttcctccgaaacgttggaaatagccgttttctgagagtgctcgtacgaaaacaatccgaccaaaataaccggaatggtgctgagcaggcagaaaaacgtgatcagtttgtagtaaaacttgtattggcttcttttcataaaaccccccatttcataacatccacttcaccttaatacaattaatccaaagattgatagatattgtcaataatcattttctaatatcggtgtctttttttcaggtggaccggctgaacccttgattataaagggataaaacaggatgtgatcatatgattgtagacggacttttgcctgctgcgctacagtgaatgcaagaatccgtgaaaggaggctaggaaaaaatgaaaacagcagaagcgcaagcgccggctgttgatgcagtcatttttaaaaaagaaaaaagaaagcgcttactaatcaagctgattcaacaaaaatatttgtacttgatgattttgccggggtgtatttattttttgctttttaagtatgtcccgatgtggggaattgtgattgcatttcaggattatcagccgttcctcggcattttgggcagtgagtgggtggggctgaagcattttatcaggctgtttactgagcctacattttttctcttgttaaaaaacacgctcgtgttatttgctttgaacctggccatatttttcccggtgccgatactgctggcgcttttattgaacgaagtgcggattgctctctttaaaaaatttgttcagacgctgatttatatcccgcattttatgtcttgggtcattgttgtatcgctttcgtttgtgcttttaacggtagacggaggcttgattaatgaactgattgtgttttttggcggtgaaaaaatcaattttctgctgaacgaagaatggttccggcccctgtatattctgcaggttatctggagggaagcgggctggtcgacgatcatttatctggcggccattacagcggttgacccccagctgtatgaagcggcgaaaatggacggagcgggacggctgcggcaaatgtggcatattacgctgcccgccattaaaagcgttatcgtcgttttgctgattttgaaaatcggagacacgctggagcttggcttcgagcatgtgtatttgctgttaaatgcgactaacagggaagtggcggaaatttttgatacgtatgtttatactgcagggctgaaacagggccaattcagctacagtacagcagtcggcgtatttaaagcggcggtcgggctgattttggtcatgctagcgaatcgtttggcgaagaaatttggcgaggaaggaatttattaggaaagggatgggatcaatggatcaatcaatcgctgtaaaatcgcctcttacgtacgcggaggcattggcaaacaccattatgaacacgtacacagtcgaggagctgccacctgcaaaccgctggcactaccatcagggtgttttcttatgcggtgtattgcggctgtgggaagcaaccggggaaaagcggtattttgagtatgcgaaggcttatgcagatctcttaatcgatgataatggcaatctattatttagaagagatgaactggacgccattcaagcaggtctcattctttttccattatacgagcagacgaaggatgaacggtatgtcaaagcggcaaaaaggctgcgcagcttatatggaacactgaaccggacgtctgagggcggtttttggcacaaagacggttatccttaccaaatgtggcttgacggcttatacatgggggggccgtttgcactgaaatatgccaatctgaagcaggagacggagctgtttgatcaggttgtgcttcaggagtcattgatgagaaagcatacgaaggatgcaaaaaccggacttttttatcacgcctgggatgaagcgaaaaaaatgccttgggccaatgaagagacaggctgttcaccggaattttgggcacgttccatcggctggtacgtcatgtctcttgctgacatgattgaagagctgccgaagaagcatccgaaccgtcatgtgtggaaaaacacgctgcaggacatgattaaaagcatctgtcgctatcaagacaaagagacggggttatggtaccagatcgttgataagggagacaggtctgataactggctggaaagctcaggatcctgtctgtacatgtacgcaatcgcaaaaggaatcaataaaggctatctagacagagcttacgaaacaacactgctaaaagcgtatcaaggcttgattcagcataaaaccgaaacatcagaagacggagcgtttctcgtcaaagacatatgtgtcggaacgtcagccggtttctatgactattatgtcagccgcgaaagaagcacaaacgatctgcacggagccggcgcgtttattttagctatgacagagctggagcctctttttaggtcagcggggaaatgacaaaaaggatacgtacggctttgtgtgtgatcgtctcagtgctctttttggcatcatgctcaagcaggccggacggaatgcatgtcattctcttttctgatatgcaggctggcgtacaggaaaaaataaaaaaggccgccgagcagaatgccgggaaggtcgatatctttccagcttttcaggaaaaactgctgactgaaattaccgcccatgagggagatgttttcatcgtgcctgaagacatgtttcaagcttacgatgatccggaaaattttcagccgttaaacggattgcctcctgaaaaaacatctccttatacaactgttaataaaaaaacaggagaaaaaacgatctatgccgttcagatcgaaaaagggaaaaaacagctgaacggctattcttttcaattgaatcgcgatatggcggcgtttatccctgtgtatgctgaaaaaacagaggaagcgctgcagctgatttctcaactaactgaagcccgatagaggtgaggatattgaagaacatcgtcttttgcggattgagcagcagagcattcagtatgtttatcaaaccactgatggagcggttttcaactcattatgagattacgggattgctggatgccgatccgaaacgttttgccgtttgcaagaagaaatttcccgagctggcccacgtgcctgagtttagcgaagatgcttttgacgagatgatgcgcgtctcaaagcctgatatcgtcattgtggcaggcagggacgatacgcatgtcgcatatattgtaaaaagccttcagtggaatacagatgtgattactgaaaaaccaatggtgacaacagtgcaggatgcgaatcgggtgcttgaagcggaggccaaaagcgaaggaaaagtcaccgtcgcgtttaactatcgctacagcccgtttcatcggaaaataaaagaaatgattctggacggaaaaataggcagggtcacttctgttgatttaaattggtatattgatacgtatcatggcgccagctattttaaacgctggaacaggtcgagacagttttccggcggtctttctgtccataaatcaacacatcacttcgatctcgtcaattggtggctcgggcaaaatccggaagaggtatttgcttatggcgccttgaattactatgggccggacagtgagtggaaccccttgccggaagaagacgggcgtttttgcgggacgtgccgtgttaaagaaaaatgccactactattcaaggtggcatccccgttcctctaaagcttctataaaggatgatcatcttgaagcaggagaccagtccagcttatatactgcatacaggcctgacgcgtgtatttttgacgaggaaattgacatcgaggatacgtacgtggcggcagtcaaatatgatggcggcgcactgttaagctactcgattattttttcggccccgtatgaaggctaccggctgacgatcaacggcacaaaaggacgtattgaatcaaatgaatttcacgaaccttccagaattccgtttgcttttcctgagcagacaatcgaatactatccgctttttgaatcaaagcagacgatacaagtggtcaaaaatgaaggggggcatggcggaggtgatccgcttttgcttgaggatctttttttagggaaagacccgctgcgccgctatgatattttagccggggctgaagctggagcctactccatcgcggttggtgagggaatgtggcgctcggttgccgaaaagaagccgatcggcatgaaagagctttttcagatgcagaatgtataatgcaaaaaaggagggggcgccatggaacatgatggctcactgggacggatgctgcgtttttgcgaatggattatgagatttgcgtatacaaacttgctgtggctgttttttacgttgctcggtctcggcgtgtttggcatcatgcccgcgaccgcggctttattcgctgtcatgcggaagtggatccaggggcaggacaacgttccggtgctcaaaacgttttggcaggaatacaagggtgaattttttcgttcaaatctgctcggcgctgtactggcgctcatcggagtgatcatttatattgatttggccttaatttatccaagtcatttccttctgcacatcctgcgcttcgccattatgatatttggctttttgttcgtatccatgcttttttatgtgtttccgctgcttgtccattttgactggaaaaaacgtctgtatgtgaaattttcgctcttgctcagtgtggcgtatttgcaatatacgcttactatgcttgcgctgactgttgctctctttttcttgcttgcgtacctgccgggcattgtcccttttttcagcgtcagccttatcagctactgccatatgcgcattgtttatgccgtgctgctgaaagtggagcagcacggcggcgagccacagaggaaatcccatatacggaaagctttttatccggaaacgagataatcatcatttctctatcataacgctgttccaaacggaatagattgatagagaaaggagagcggataaaatgctgaaggtagcggtatttgatgaagagcatgaaaaagacttacaaacggaaatcaattcatttttaaaagggatatcggaggagcagctgatagatatcaaatatacggtttcggcggcgtgcgacccagacggcgagcagctttactgtttttccgcccttattttatatcgcaaataaaaagatctttccgcaggcgcggaaagatcttttttgttaatatgcttttttcactcttggacttcttggtttatcgagtttctccgcttttttgatctctcttctttcttttgagagcgattgatagagagaggcaatcatcagcaggataacgatagaaaacggcagcgctgccagaatcgctgtgttctgcaaagcggcaagccctccggaatataggagcacagccgccatggcggactgaatgataccccagctgagtttcacagaattcgccggatttaaagaaccgtacgacgtctgcatgcccagcacgaatgtagctgaatcagctgacgtgataaagaatactgcgatcagaatcaatgcaaggatcgatgtcaccattgtcagcggatagtgatcaagtgttccgaacagcatcgtttcagtggacagctttgctacattgaacgcgcctttttgctggagatccatggctgatacgccgaaaatggagaaccatagaaatgtcaaaatacaaggtgtcaccaagacgccgattaaaaattcgcggatcgtccggcctctggatacacgggcgatgaaaatgccgacaaatggagaccaggaaatccaccatgcccaatagaaaatcgtccagctgttaatccattcgcgtttttcaggatcgttcggtgtcagtctgaagctcatttgaacgatattttgaatgtattgtccgatagaatctgtaaatgagttcattatcagcactgtaggcccgacaacgagcataaacaacattaacaatccggccaataccatgtttgtgttgcttaaatacttaattccttttccgagtccgctccacgcagaaagtaaaaagagcactgtcacaataatgattaaaatcaattggacgataaacgcattcggaatgccgaacaggtaattcaaaccgccgttaatttgggttgcgccaagaccaagacttgttgacaccccgacaacagtggcgaaaactgcaatacagtcaatggcctttccgatcggtccgtttactttatccccgataatcggtgacagtgtgctgctgattaacccgggtgcgcctttgcggaattggaaataggcaatgcataatgccacaatggcataaatggcccaagcgtgcaaaccccagtggaaaaacgtatagcggagtgcatctctgaaggcttggggggtttctgtttcacctgatggagagctaattgcgtaatggctgatcggttcagccgcaccgtagaatactaagccgattcccatgcctgcgctgaacagcatggcaaaccatgataataacccgaattccggtttttcatcaggctttccgagtttgatttttccgatcgggctgaaaatcaaaaagagacaaaacccgacaaacaaagagacaactaaaagataataccaaccaaatgaatcggtaataaatgcttgtgccgattgagacacattttgcaggctgtcaggagaaataacaccccataatacagctgcagctgtgattgcaatcacaatccaaaatacactagatatatgtttcaacatttctcaccctctaattttttgtgtacgcctatatcttgctcgcaggcttagtatggtcgtacgatggcagctcattcctctcttaaaattaccccgcaatcaggtgaaacaaaacaagtctcaccctaacatgaatgcggggaatgttcaaatgtgagtttggcggcaagagatttaaagagtaatgattaagaacgggcgtattgcccggcatttagccctgcaagcctgcctgtgacaagggcggaggtaatattgtatccgcctgtgtagccgtggatatccagaatttcaccgcaaaaataaagcccctccatttttttagaagccatctttttcgggtcaatttcttttacagataccccgcctcccgtgacaaatgccttatcaagcgacagtgtgccatttgcgaggacagtaaactgcttgcagtcccttacaaattgtctgaaaggatccttcggcagctcagaaaacgatacgttcggagagatgccgtttttttcgagcaggaataggagatagcgctcctgcatccaaggcttcagcacgtttttaatggtttttttcggtgcttccttcagttctttatacatcttttggaaaagcgtttcttcattgatatccggatacaagtcgattctgatcggcacttgaggctgttttttcagctcttttacgacaaattggctgcatctgagaatggcaggtcctgagaggccgaaatgggtaaacagcatgtccattttatgtgtgataatcggtttgccttttttatttaacacactaacggctacatctcttagtgataagccctgaagtgttttttgcttaatgaacggttcgccagaagtgactggaacctctgtcggaaacagctctgttatggtatggcccgcggcttcagcccattcatagccgtctcccgtgcttccggtatgaggcacgcttttaccgcctacagcgataatgactgcctggctatggatcatttcgccattattcgtcacaatccctgctgcctgtccatcttcatatataacagatttaattttctcgttcgttctgattgttacgcggagctgcttcagcctgtttaacagcgcgtcaacgacactttgggctttgtcggtcacaggaaacatccggccgtgatcctcttccttcaattgaatgccgaggttttcaaaaaacttgataatgtcttcattattaaattcagaaaacgcgctgtataaaaaacgcccgttgccggggatgtgcttgataatttcttccacaggaaggcggttcgtcacattacagcggccgcccccggaaatcgcgagtttccgtcctaatttatttcctttatctatcagcaacacgccagcgccctgttctcctgctgcaatcgcagccatcaagcctgaagggcctccgccgattacgattacgtcatattgtttcatctttatcatcaactttcttttcatttcgtgtgcggacaccccgtccgcagtactattatagcgaaagaaagccgctccttaaacgtcttttgccgcggacatgaatgttcacaggattgcttttgtatttattaccgtctaaatgcccagttgtggtaaaatagaaaagttgaatcttcgtagaaaatggtgatgaagaaacatgtcaagcaaactgttaagaggcacgtttgtattaacgctcggtacatatatatcgcggattctggggatggtctatttaattcccttcagcattatggtcggggcgacaggcggtgcattatttcaatacggatacaaccaatacactttatttttgaatattgctacgatgggctttccggccgctgtttctaaatttgtttccaaatataattcaaaaggggattatgagacaagcaggaaaatgctcaaggcgggcatgtcggttatgctcgtcacaggaatgatagcctttttcattctgtatctatcggctccgatgtttgcggaaatatcgctgggaggcaaggataataacggcttgacaattgatcatgtcgtttatgtcatccgcatggtcagcttagcgcttttggtcgtaccgattatgagccttgtccgcggattctttcaagggcaccaaatgatgggtccgacagctgtttcccaagtcgttgaacagattgtccgcatcatctttctattgagtgcgacattcttgattttgaaggttttcaacggcggccttgtcatcgctgtgggctatgcaaccttcgcagcgctgatcggtgccttcggagggctggtcgtgctttatatttattggaacaaacggaagggcagcctgctggcgatgatgccgaatacgggtccgacagcaaacctaagctacaaaaaaatgtttttcgagctgttcagctatgctgctccgtacgtttttgtcggactagccatccctttgtataactatattgatacaaatacgtttaacaaagcgatgattgaagccggtcatcaagccatcagccaagacatgcttgcgattctaaccctgtatgttcagaagctcgtgatgatcccggtttccctagcaactgctttcggactgacattaattccaacgattactgaatcgtttacaagcggaaactataagctgttaaatcagcagattaatcaaacgatgcagacgatcctgtttttaattattccggctgttgttgggatctctctattgtcaggaccgacgtatacgttcttttacgggtcagagagccttcaccctgaactgggggcaaacattttgctatggtattcgccagtcgcaattctgttctctttgtttacagtcaacgcagccattctgcagggcatcaataagcaaaaatttgcggttgtcagccttgtgatcggcgtcgtgatcaagcttgtgctgaatgttccgctgatcaagctgatgcaggctgacggagcgattttagcgacggcgcttggatatatcgcttcccttttatatgggtttatcatgattaagcgccatgcaggctattcgtataagatactagttaaacgaactgttttgatgcttgtcttatcagccattatgggtattgccgtgaaaatcgtgcagtgggtattaggcttctttatttcctatcaggatggccagctgcaagctgcgattgttgtggtgatcgcggccgctgttggcggagctgtctacctgtattgcggctaccgattaggatttttacagaaaattttaggccgccgtttgccaggtttcttaaagaaaggcagacatgcaggctgatgaactagatatgatgaaactgagggctcgcatgctgcgggctttcttttataaaggagagattgggaatgagacttgataagctgcttgccaacagcgggtatggttccagaaaagaagtcaaagccgttgtgaaggctggagccgtgatgatcgacggcaaacctgccaaagatgtaaaggcgcacgttgatcctgatacacaggaggtgaccgtatacggggaaccggttgattatcgagagttcatttatcttatgatgaataaaccgcagggcgtgctgtcggcgactgaggacagccggcagcaaacagtggtcgatctgctgacgccggaggagatgagatttgagccatttccagccggcaggcttgataaagatacagagggctttttgctgctcacaaatgacgggcagctcgcacatcggctcctttctcctaaaaagcatgttccaaaaacgtatgaagtccatttaaaatcacagatttctcgggaagacatctccgatttggaaacgggtgtctacatagagggcggctataaaacaaagtcggcaaaagcggaaatcaaaacaaacgacagtggcaataccgtgatatacctgacaattacagaaggaaaataccatcaggtcaagcaaatggcaaaggcagtcggcaatgaagtggtttatctgaagcggctttcgatgggacgcgtttccctagatcccgctctggcacccggagaataccgtgagctgacagaggaagagcttcatttgctcaatgagccgcaagcatgacaaaaaccccgcataccgaatgcggggttttatttataagcacacaaaaacaaggctcagcagtttcttcgccctattatctatcgggccgctctcaggcggccctatgtaatttttcaatttatgaggtaatctttactttctttctcgttgtctcccacttgccacggcttggactatgaacaagatcattatatgccaacacatttaagtctctttgaatcgttctaggtgtaatgccgaattcgtcaaccagttcctgtgttgtcacaagacctttttcttggataaacatgtaaactgatttgattcgagttagcatacggtttgttgaaggtttcaaaaaaccactccctatcataagatcggatggacttgactaaccacaactcacgactatcaactgcgtacgaaatagcaacaaaggcagacatctgtaattgttataataattcgccctcattatacacgatattgcagtgatgaatctagggataactcctattaattttttccaattcgcgttgggcagccatccttgttggattactatgtatttcggctcaatattattatggttaaagaaactttttttattctgtttcgtagtaaattttggaggtgggagagttttgacaaatttgcttgaagcttcaatagaacaggccgggtatacaagccgaaaaaaagtgctcaccgatgtttttctggaagtcagaaaaggggaactagttggactgatcggagctaacggcgccggaaaaagcaccgcaatcaaggcgatactcggcctttcagaagattttaaagggcatattgcctggaacgactgttcatttgcatatattccggagtatccgtccttttacgaagaactgacgctgtgggagcatttggatctgatcagcacactccacggcattgaagagagtgaatttgcgcatcgggcccaaagcctgctgcagacgttttcgcttgatcaggttaaacatgagctgcctgtcaccttttcaaaaggcatgcagcaaaaactaatgcttatccaggcctttctctctaagccggatatgtatgtgattgatgaaccgtttatcggccttgatccgatatcgaccaaacgctttgtggacatgcttaaggctgaaaaagaacgcggagccggaattcttatgtgcacgcatgtactcgataccgcggaaaaaatctgtgaccggttttatatgattgagaaaggttcattatttctccaaggcacgttaaaagatattcaggacaagaccggattagaggggcagtcattgcttgactgtttttataaggcagttcaaggtgatcggccatgaacgggcgtacgctcttttttcgaaggctgtttgactattacaagtatcagtttaaagtgttgcatgcggtcattgactggacagtcgctctctatattgttttgccggcgattgcttttgtcatctatcagtatattgatttgatgaatggaagaggtcttctttatgagtggtctgaagtggcggagtggagatggctgtacgctgtgtgtgggctgatcatgtttacaggctcgattcgtacatttttaatggaagcggacaaagtgtttttgctgcaaaagaaggaaatcatctatcagctcaaacggtacgcgcttttgtattcttttctggtcacgctggctaaatggctgcttctcttttttattgtccttccccttatcagtcattctgttcacatcacattcgcagaaagcactgctctattgtgttatttgtttggccttcatatattctttttatccttaaagcaagacaggatcagaaagccgcgctctatttcgagatggattggcgatatccttgtcagagctattctttttactggttctgctatcctgattgtttttactgagcggcatttgattgcgctttttggcattttatttttgcttttctcagttatccgcagtttgaaaaagacggcttcgttcacggcttttgaagctgaggtgactgaagagaaaaaaagcaggcttgcccttgcaggacttgtgatgatgatgagtcaggaggcgggaatgccaaaagtaaaagacaggatgagaagaaaaccgttattataccgaaattcaaaaaggatatttaaaaggcgaacgatctgcacaggctataaggaattgttttttaaagtcatgctgaggaatggcgagtatgcgaggcagatgtacatgctattgtcagctttcaccgttctcatatttgtttccccaatttggctgaaggtgattgcgctgctggtatatacaggggtttgccgttatatcctgacgcttatttttgacaaggtcatggatgccccttttttaattggcaccgataaggaaagtgatgaatattatcgggccagaaaaagctgtatcaacatcctgcactatgcgtttgccgcctgttgttttttagcggccgctgtctctttattgtttacataaaaaaacccaaacggcgacgtttgggtttttctgtatgcattataaaataaacagctggatgaaaaacagaatggcgaaaacgatgacgagcggatgaatctctctccattttccccgcgccgcttttacaattgggtacgaaataaagccaagcgcgattcctgtagaaatgctcgaggtcaaaggcatggctagaatgacgagaaacgcaggaaatgcctcgtccatctctttccagttcatattggaaactgagcccatcatcaggctgccgacgataatcaaagcaggcgaggtgatggcggctatacctgacaaggcgctgacaagcggactgaaaaacattgaagccgcaaacatcaccgcgacagtcaaagccgtaagccccgttcttcccccggctgcgacaccggcggaagactcgataaatgcagtcgtcggacttgtgccgaaaacagctcctactgtcgtcgcggttgaatcagcaagcagcgcttttcgcacgttcggcagcttgttgtttttcatcagcccggcttgctcggcaactccgatcatcgtgcctgtcgtatcaaaaatggtgactaatagaaaagaaaagacgacagcgtacaggccgtgatgaatgacatcgccaaaagcggtaaatggatttgagatcatcaatccttccggcaaatgaggaagcgacataaatccctttgaaaaatggagctgaccggtgaaaaaggcgatcaaagcggtagctgccattccgataaataaagcgccgcttacattcagcaccatcaggaccacgctgatcaaaaggccgaccagcgttaagataacaccaggtgaatgcagattgccgagagtgaccaggtttgactcatcagctgccacaattcccgcttgacgcaaaccgataaaagcaataaacagcccgatccctgttgtgatcccgtattttaaattgtttggaatcgcttctataagttgttttcttaaaggcgttaacgatagaataatgaagagaacccctgctgtaaatactgcgctgaaagctgttgcgtacgtgatgccgccatcgcttgcgcttacgacatgaaaggctaaataagcgttcaagcccatgccgggcgcaatagcaatcggataatttgctgccagggccatccacagcgttccgacaatggaggcaataatcgttgcggtgaaaacctggtcgaaaggaaccccggcgttagccagaatgaccggattgaccacgacgatatagaccattgtgaaaaaggtcgtcagccctgctatgatttcttgctttatggatgtttgctgctcttttagatgaaacatagtatcctccaattacgaacgttttaacaaaacaccattaatattattcgttttatttggtttttgcaagtcatttcttgcggaaaggggatcattatgaactgggaagttgaagtgatcagaaaaaaagaggatttaattcgtgatacacaggaatttttgagaatcaacagtgtcatggacgaaacaaccgccggacccggtaaaccgtttggagaaggggtaaatgccagcctgacttcattgctggagcttggagaaaaagaaggctttacaacaaaaaatcttgacggcttcgcaggtcatattgaatggggggagggcgatgacattatcggcgtactttgccatgttgacgtcgtgccgccgggagatgggtggacgagtgatccattttcagctgaaatccgcaacggacggatttatgcaaggggcgccattgatgacaaaggcccgacaatggcggcattctacgcgctgaaaatcgtgaaagacatgaatttgcccctgtccaagcgagtcagaatgattatcggaacagatgaagaaagtgattggagatgcgtagagcattatttcaagcatgaagaaatgccaacaatgggctttgcgcctgacgccgattttccgatcattaatgcggaaaaagggatcatcgatgcttctttacttattccgcaccgcccaaatcaagctgaaccaaaggcagtgcttgtctcgtttcaatcaggccttcgcttaaacatggtgcccgacgctgcggaagctgtcattgaagggccgaaaaatgaagagattctgtcttcatttaaagacatgctccgcacgacggaccaaaaaggggaagctgcaatagagaacggacagctcattttgcgtatgtacggtctttcctgccatgcgatggaaccgaacaatgggatcaatgccggcattttattgtgcgaatttctccagcagactgagcttgacgatgcaggaaagcggtttgtgcaagttgtgacagataagttctcaggtgatacaagaggaaaaaaactggacatcgactgtgaggatgaaatcagcggagagctgacattaaatgtcggaacactgcgctataaagaagggcaaggaggcgagctcgggatcaatatccgctatcctgtgacagcagaaagcaaagtgatccgcgatacattcgaaagcgcatctgaatttgagctgggagaattcaaagacagcaagccgcatcacgtgtccgcagatcatccgttagtcaaaaccctgcaaaaggtttatgaaggccagctgggtaaaaaagctgatttaatctcaatcggcggggggacttatgcgagatccttaaaagccggtgtcgcgttcggcccgctgttccccggacgccctgacagcgcacaccaaaaggatgaatatatcgaaattgatgacctgctgagatcgacagcgttatatgctcaggccatttacgagcttgcaaaataaaaggaccggcttctgctgaagccagtcctttttttaaataaatgaccataaatcagttgataagtaccgttctcctgtatcagctgtcatgcagaccacaactttgtcaggagagaggcgtttcgctgtttcgattgccgcgaagcaggcagcgcctgatgaaggaccgacaagaattccttcttcagcagcaagccgtcttgtcgtcgtatacgcgtcttcatcagagattttgataatttcatcataaacgtcttcatttaaaatcggcggtataaagcctgggctcgttcctacaagtttatgcgcgccaggttttccgccggataatacaggcgaacccgctggctcaacaacatgaaccgtgatatccggaaaaagctctttgagcgcctcacctgttccggtaatggttccgcccgttccagaggaggctacaaaagcgccgagcggttttccgatttcctctattgcccgggcgatttcaggcgctgttgtttttcggtgcgcatcaggattagcagtgttatcgaactgcattggaatatagctgttcggaatttgttcggcaagctccttcgcttttttgatgctgcccggcattctttcctctccgggagttaatacaacctctgcaccgtaagctttaagtaggttgatccgttccttcgtcatcgtatcaggcataactaagattgctttatatccgcgtgctgccgcattcatggcgagcccgatgccggtatttccgcttgtcggctctataataactgatcccggcttgagtaaaccgttttgttcagcttctatgatcatttgataagcggctctgtctttcacactgccgctcggattgaaaaattcaagctttaaatagacttgtgccgcattttccggctgaagccgattcaatctcactagcggtgtatctcctatcagatcagctgtgtttgcaacgattttcaacattgtcattcctttctgaataaaacaagtgtcatataatatcctaacataataaacgtttgtgcgagagtgttttcatacactgttcctctatccgcacagcctctttattgataaaataatagctgtcaaagaagggagtgtcagacggatgccagatatacggcctcattatttcatcggcgttcccatacctgagggaattgcaaatccgatctaccaggctgcgaaaaacgaaccgatattgacgtttcaaaaatgggtgcacccgcttgactatcatatcacgttaatttttctcggagcggcggatgagacacaaataaagaagcttgaaggttcgctagcagagattgcttcagaaattgatccattttcaattaagtttggcaagatagatgtattcggcgaccgcagaaagccgcgcgttttacatctggagccaaagaaaaacaaaacgcttgatagactgcgggaacatacgaagcaggctgtacttcaggccggctttcaagtggaaaaaagaccgtatcatcctcatatgacgctggcaagaaaatggacaggcgaagatggatttccagctcatgttccgtttgaaagcggcgaggtttcgatgatggctgaacgattttcgctctttcaaatacacttgaaccaatcaccaaaatacgaggaaatattcaaatttcaattatcttaattcattgcggagtggagaaacaaacatggcacaaatcatcaaaattcatgattatatatcgagatatgagcttgatccgtaccattatatcaaccagtttgtacgtttgaaaaaagagcgctggctttcactagtagaagcagcggagcgccagcatgaagaaaggcaagccagtgctgaagaaccggaaccggtgcagaaacgaaaaaaattttcattgaaaagaagaaaagaagagataaaagccgatatacaagaagagagacaccaatggtttgaggacgaagaagatattcatgtaaggctcccgaagagcagggtggcgcttgcttctttttataaaaggcatttatatgattttcagctcaaatgggcaagctctactctttcagaaatatctcaactctcaaaccaagtgaagcaggaccgcattttgcgttatctgacccagcagctgcctgattcttattttattatgtataagcctgtgctgaaaattcagcaggcggcggttgaattaagcattgtgattatttctcctctggaaatttattgcgtttcttttttagaggctgaggaagacagtgtctacatagggtctaaaaatcgtttttgggacaagaaaacagcctctcagactgcatcagtgttaaatccagggcttagcctgtttcgtacggactcggttgtgtcaaagatcgtaaaggaaaaacaggctgagattccggttcgaaaattgcttctgagcagaacgtcgtacatcgattacccggagccgccatacggcttagaaatagcggataagcggagcgcggaagaatggattgagcggcagaagaaaaacactgctccgatcaaacatcatcaggtaaaggctgcaaaggctctattgtcttactgcatgtctgactcctatcgcagacaggagtggctggagtaaaagagaacgatttgagcggttttctcataacataagcaggtgagaaagatgagccattggttttttattattaatccgacagcaggacatcgaaacggcctgcgtgtttggaagtccattcaaaaagaattgatcaaacgaaaggttgagcaccgttcatttttaactgaacatccgggacacgccgaggtgctcgccagacagatttcaacgatacaggaatataagctgaagcgcctgatcgtcattggcggagacggaaccatgcatgaagttgtcaacgggctgaaagttgttgacgatattgagctgagctttgtgccggcgggcgcgtataatgatttttcgcgagggttctctattaaaaaaatcgatctgatacaggaaatcaagaaggtaaagcgcccgttaacaagaacctttcatttagggagcgtcaatttccttcaggataaatcacagattctttattttatgaatcatatcgggatcgggtttgacgcatatgtcaataaaaaggcgatggaatttccgttgagacgggtttttctttttctccgccttcgatttcttgtgtatccgctttctcatttgcacgcttcggcaacctttaagccgtttacgttagcttgtacgacggaagacgagacgcgcgaatttcatgatgtctggtttgccgttgtatccaaccatccgttttacgggggaggcatgaaggcggcgcccctagcaaatccgcgcgagaagacatttgatatcgtaatcgttgaaaaccagccgtttttgaaaaaatattggcttttatgtctcatggcatttggaaaacatacaaagatggatggcgttacgatgtttaaagcgaaggacattacattttacacgaaggacaaaatcccgttccatgctgacggagaaatcatgggcactaccccgtttcgtctggcatctagtccttcacccctaagaatcaaaacataaacgtgtttggaggagagagcttccgatggtcagcatccgccgcagcttcgaagcgtatgtcgatgacatgaatatcattactgttctgattcctgctgaacaaaaggaaatcatgacaccgccgtttcggcttgagacagaaataacagattttcctctggctgtcagggaggaatactcccttgaagcaaaatacaagtacgtctgcgtatccgaccatcctgtgacatttggaaaaatccattgcgtcagagcatccagcggccacaaaacggatctccaaattggcgcggtcatccggacggcagcgtttgatgacgaattttattatgacggagagctgggcgccgtttataccgcggatcataccgtatttaaagtatgggcgcctgctgcaacctcagctgctgtcaagctttcacaccccaataaaagcgggcgcacattccaaatgactcgcttggaaaaaggcgtctatgccgttacggtcacaggtgaccttcacggatatgagtatttgttttgcatctgcaacaattcagaatggatggaaacagttgaccagtatgccaaggctgtgactgtaaatggagagaagggcgtcgtcttgcgcccggatcaaatgaaatggactgctcctcttaaaccattctcacaccctgtggatgccgtcatctatgagacgcatcttcgcgacttctccatccatgaaaacagcggcatgataaacaagggaaaatacttagcgctgacggaaactgatacacaaaccgcaaatggcagttcttcgggattagcgtatgtaaaagagcttggtgtgacacatgtggagcttctgccggtgaatgattttgccggagttgatgaagagaagccgcttgatgcatacaattggggatataacccgcttcatttctttgccccggagggaagctatgcctcaaatcctcatgatcctcaaacgagaaaaacagagctgaaacaaatgatcaataccctgcatcagcacggtctgcgagtcattctggatgttgtttttaaccatgtgtataagagggagaattccccctttgaaaagacagtgcccggttattttttccggcacgacgaatgtgggatgccatcaaacggcaccggcgttggcaatgatattgcatcagaaagaaggatggcaagaaaattcattgcggattgcgtggtctattggcttgaagaatacaatgttgacggcttccgctttgatctcctcgggattttagatattgacaccgtgctttatatgaaagagaaagcaactaaggcaaagcccggaatcctgctttttggagaagggtgggacctggctacaccgctgccgcatgaacagaaagctgctttggcgaacgcgccaagaatgccgggcatcggcttttttaatgatatgtttcgtgacgctgtaaaagggaacacctttcaccttaaggcaacagggtttgcgctcggcaacggtgaatcagcacaagctgtgatgcatggaattgccgggtcttccggatggaaggcattagcaccgattgttccggaaccaagccagtccatcaattatgtcgaatcacacgacaatcacaccttttgggataaaatgagctttgcgcttcctcaagaaaatgacagccgaaagcgaagcaggcaaaggcttgcagccgcgattattttgcttgcccaaggggtgccgtttattcacagcggccaggaatttttccggacgaagcagggagtggaaaacagctatcaatccagtgacagcatcaaccagctcgactgggatcgccgtgaaacattcaaagaagatgttcactatatccgcaggctgatctcgctgagaaaagcgcatcctgcattccgtcttaggtccgctgcagacatccagcgccatcttgaatgcttgacgctaaaagaacaccttatcgcatacaggctttatgatcttgacgaggttgacgaatggaaagatatcattgttatccatcacgcgagtccagactccgtcgagtggaggctgccaaacgacataccttatcggcttttatgtgatccatcaggatttcaggaagacccaacagaaatcaagaaaacggttgcagtaaacggcatcggaacggttatcttatatttagcatcagatcttaagagttttgcttgacgaagtttgtgctatagcgctaaaatttaaaggacggctattgattagcatatgagactctcaatagctgtcttttttatttttatacgattcgtacgaaaaaggcattcgctggatagactagagacgattagccttaattctaaaatattttaagaaatgatgggttgaacattgatatgaactggttgggacaattactaggtagcgattgggagatcttccccgccggaggagctacaggagatgcatattatgcgaaacataacgggcagcagctttttttaaaacgtaatagctcaccttttttagctgttttatccgccgaaggcattgttccgaagctggtttggacaaaacggatggaaaatggggacgtcattacggcccagcactggatgaccggcagagagctgaagcctaaagacatgagcggacggcccgttgctgaattgcttcgtaaaatacacacatcaaaagccttgctggacatgctgaagagacttggaaaagaaccgctgaacccgggggctcttttgtctcagctgaagcaggctgtatttgctgtgcagcaatcttcgccgctgattcaagaagggatcaagtatttggaagaacacctgcatgaagtgcatttcggtgagaaagtcgtttgccattgtgatgtcaatcataataactggctattgtctgaagacaaccagctgtatttaattgactgggacggcgccatgatcgctgatccggcgatggacctcgggcctttgctgtaccactacgtcgaaaagccagcttgggagagctggctgagcatgtacggcatagagctgacagaaagccttcggttgcgaatggcttggtatgtgttatctgaaacaattactttcattgcctggcataaagcaaaaggtaatgataaggaatttcatgatgcaatggaagagctgcatatcctcctgaaacgaattgttgattaatcaggaatacgaatccatttgctctacccattgagacaggctgttctgatgctcttgtatgtgtgagtcgatggatttggacgatattcctgattggctgtagcggtaaacatcttcaagcacgtttttgaaatttgaatcaagctcggtgtttgccatcagtgatttaatcacacgctcaagctgctcgtactctgcgactgttccgcagcagtccaattgatggtcagtcaatatatccttcaataaatgaacttgatgctcataatgtaaacccataacggtacacatcccttcagtatcatacgggttaaattgttcaaaacagagcgtttttatacatgggaaaggagtgttccagcagacgggaccctctttttttatgcgctcggccttaagagagatacactggaaaaacgagcttgcgggtctttttaattcatggtatgttgttagtcgaaataatagatagaggtgtcaatcatatgagaatgcgccacaagccttgggctgatgactttttggctgaaaacgcagatattgccatcagcaatcctgctgattataaagggaaatggaacacagtgtttggcaacgacaatccgatccatatcgaggttggtacaggaaaaggccaatttatttctggtatggccaaacaaaatcccgacatcaattatattggtattgagttatttaaaagcgtcatcgtgacagccgtccaaaaagtaaaagacagcgaagcgcagaatgtaaagcttctgaatatagatgcggacacgctgacggatgtgtttgagccgggggaagtgaaacgggtctacttgaacttttctgatccttggccgaagaaacggcatgaaaaacgccgcctgacatattcccacttcctcaaaaaatatgaagaagtaatgggcaaaggcggatcgattcattttaaaacggacaaccgaggtttatttgagtactctttgaaaagcttctctgagtatggcctcctgctgacatacgtcagtcttgatttgcataacagcaatctggaaggcaatattatgacagaatatgaagaaaaattctctgcactcggccagccgatctatcgggctgaggttgaatggagaacgtaaagacagactctgacaggagtctgttttttttatgggccgtttgctaccatgatgacaggggggatgaaaatggaaacaatgaaaattggaaacatcacgttgacctggcttgacggaggcgtgacgcatatggacggaggcgccatgttcggcgttgtgccaaagccgctttggtctaaaaaatatccagtcaatgaaaaaaaccagattgaactaagaacagaccctattttgattcaaaaggatgggctcaatatcatcgttgacgccggaattgggtccggcaagctgactgataaacaaaaacgaaactatggcgtgacacaagagtcgaatgtgaaaccatcgttagcagcactcggattaacggttgccgatatagatgtgatcgcaatgacacaccttcattttgatcatgcatgcggtttaacggagtatgaaggtgaacggctcgtctctgtctttccgaatgcagtaatttatacatcagctgttgaatgggacgaaatgcgccatccgaatatcaggtcgaaaaatacgtattggaaagaaaattgggaggctgtagctggccaagtcaaaacctttgaagacaccttaacgatcacagagggtattacaatgcatcacaccggaggccatagcgacggacacagtgtcctgatatgcgaggatgcgggtgaaactgccgtacatatggcagatctgatgccgacacatgcccaccgcaatccgctatgggtgctggcttacgatgattatccgatgacctctatcgcgcaaaagcagaaatggcaggcgttcgcagcagaaaaagacgcttggtttattttttatcatgatgccgagtatcgcgcccttcaatgggaggaggacggaagcatcaaagattcagtcaagcgaatgaagcaatagcatatttttatgtttaccctgcatgttttccggctaataatgcaaacctagtactaattatgctcagaaaggaagaggcagggtgaaacaattcagagtaacaaacgaaggagacattcaaacaacattaagaggccttgaagtgctctctgttccttttttgaacaaaggtgttgcttttactgaggaagaaagaaaagaacttggtttaaaaggctttctgccgcccaaggtattaacaattgatgagcaggcgaaaagagcgtatgagcaatattccgcacagcctgacgatttgagcaaaaatgtctatttaacggcgctgcacgatcggaatgaaacgctgttttaccgcctgttaaatgaccatttaggggaaatgctcccgattgtctacacaccgacagtcggaacggcaatccagagatacagccatgaatacagaaaaccacgagggctctatctgtcaatcgatgacccggacggtatgaaagaagcatttaaacagtataaagatcaaagcgatacgatcgatttaattgttgcaactgatgcagaaggaattttaggaatcggtgactggggcgtcggaggaatcgcgatttctattggcaagctggcggtttatacagcggctgcgggcattgatccgagcagagtgctggctgttgttttagatgcggggacaaatcaggagagccttttgaacgacccgctttatgtcggcaaccagcattccagagtgcgcggggaacgttatgaccaatttattgacgactacgttgcgctggcgagagaaacatttccgaatgcattgctgcattgggaggatttcggggcgaaaaacgcgcgaagcattttgaaacgctataaagataaagtgtgtaccttcaatgatgatatccaaggaactggcgctgtttctttggccgcagtcttatcctgtgcaaaagcgtctaaagttccgctgagagatcacagagttgttatattcggagcgggaacggcaggaatcggaattgccgaacagctgcgggaagcattggtgcgcgagggactgagtgaagaagaatcatacaagcgcttctggtgcatagacagaaacgggctgttaacagatgatatggatcagcttcttgatttccaaaagccgtatgcccgttcggctgatgaagtgaaggattatcagcggaacggagacggcggaggcattgatcttcttgaagtggtccggcaggcgaaaccgacgatcctgatcggcacatctacggtttccggcgctttcactgaagaaattgtaaaagaaatggcgtcacatgtgaaacggccggcgattttgccaatgtcaaatccgacaactctttctgaagcaaagccggaggatttaatcgaatggacagaaggccgtgcgctgatcacgacaggaagcccgttcccgccagttgaatataacggagttacgtatcatatcgggcaggcaaacaacgcgcttgtcttccctggtctcggtcttggaacgattgttaccaaatcaaaattaattaccgacggcatgtttgaagcatgtgcccgggcaatcgcaggtatggtcaatgtcggggtgcctggcgcgccgatgcttccaaaagttgaagatttgcgcactgtttcggcaaccgttgctgttgaagttgcaaaaaccgcaatgaaggaaggcgtcgctacggaagagcctgaagacattatacaggcagtgcaggatgcgatgtggtatccggtatacaaaccgattcgcgcgatataataaaaaagagccgctgcgtgggcagcggcttctattttttgcttgtccggtgttaagaggcgatcgtatcaatgacatcaacaatttctcccgttttcgcatccaccatgacttcatactgttctaattctccgaaagctgatcgtgtaatgccggttttgtatacctgtaccgtttctccgttaatattgtaaggctccggctgggtgtaaatccatgatccgtcaatcgggccccgctgcttaaaagcagattttacaattcgaagcgctttttctgaagaaatataaggcttcatcacatattgtttcacaacgacagccgtacaaattccaagtcctgctcctaaaagaagatgacgcaatttcaaaataaagcacctcctggttgatcgtacttttcattatacagaaacagccaaatcctgttaagcaatacgcggctgatcgagcagattgggtcagggtgcttggaaaacttcattgtttctaataaaataaaaggactacatagaaatgaggggaaaacatgaatcaagaaacgaaagcgcttttccaaacactgacgcagcttcccggcgcgccgggcaatgagcatcaggttcgtgcttttatgaagcaggagctagccaaatatgccgatgacatcgttcaggacagactgggaagtgttttcggagtcagacgaggcgcagaggacgcaccgagaattatggtagccgggcacatggacgaagtcggcttcatggtgacatccattacagacaacgggctgctcagattccagacgctcggaggctggtggagccaggttttgcttgcgcagcgggttgaaattcaaacagataacgggccggttccgggtgtgatttcaagcataccgccgcatttattgacagatgcgcagcgaaaccgaccgatggatatcaaaaacatgatgatcgacattggagcggatgataaggaagacgccatcaaaatcggcattagaccgggacagcagatcgtgcctgtttgtccgtttacgacgatggcgaatgaaaagaaaattttatcaaaagcatgggataacagatatggatgcggcttaagcattgaacttctgaaggaattacacggtaaagagcttccgaatacactctatgcgggtgcaacggttcaggaagaagtagggctaaggggcgcgcagacggcttctcatatgattaaaccggacttgtttttcgcccttgacgccagcccggcaaacgatatgagcggagacaaaaatgaattcggccagcttggaaaaggctttttgctgcgcattcttgacagaacgacagtcatgcatcgcggaatgagggaattcgttcttgatatggctgaaacgcatgatattccatatcaatattttgtatccggcgggggaacagacgcaggcaaggttcatatttcgaacagcggtgtgccgtcagcggttatcggaatatgttcccgctatattcatacaaacgcttctatcattcatattgatgattatgctgctgctaaagaaatgctcatcaaacttgtaacagcctgcgataagcagacggtggatgcgattaaagaaaatatgtaggtttcataaaagcttgttgaacgagcagtaagcccggatcgacaagcttttttcttattctgtttcaaatagataggaaagggccttaatggcttggttaacggtttcaaccgtaatattcgctttattggaaagctcttttaaaggatggtggagcgattccggccggatgataatcaggggttttccttttgcgatcgcatatgatgcatccattgccgtgttccactgtttgtacttttcgccaaacagggcgatcacaaagtctgctttattcatcaggacggcggttctgaagttgttgatgtcagaggctttgtcatcctttaaaacggcatttggctgtacgcccataatttcttcaccaatattgtctgagcggtcatgattctccatcgggccaacaaacgtaatcgggagcttcagtgattttgttttctctttaatttcctcgcgccaattgctgtggatttctcctgctaaatagacgataaactccatataaaaatccctccttatgtatgtccatctgtaaattttaccctcatgtacacgatgttaaacgaaacgagcttgataatgcaaataaaatatgataatgataatgggaaagccaatcttacatattcattcgttgcatataagtggttttgcctcaagcagtttggtatgatccaaatggacgagtatcgataaaaaacatgtaagaacataaacaactggagggatatgaaatgaaaaaaattgaagcaactcaagagctggaaaaagcggtaaaggatgattggtctgtatttatgttttcagccgattggtgcccggattgccgttttgtagagcctttcctgcctgaactggaagcgaatttccctgaattcacctactactacgtagaccgtgacaaattcattgatacatgtgcagagtgggaaatttacggaatcccaagctttgtggtgtttaatgaaggaaaagaagtaaatcgttttgtgagcaaagaccgcaaaacaaaagaagaaattgaacagtttttaacagactctctcgctaaagcgtaaaggaggacatcggtttgaaaatgacctcaaggaagctgtcagatatactgaaacagcgccttcagcacgagaatcgctcctttctgtttgacagagaaaaagacaccctccgtgttgaggatcaaacgactaaaaaagggattacactcgatttgccgccgattattgcaaaatgggaactgaaaaaagacgaagccattgatgagatcgtgtactatgtctccgaagcgatgacggcaatggaagggaaggctcaggaaatgaccgggaaagaaactcgcatttatccggtcatccgctcgacttccttcccggacaagtccagtgaagatatcccgctcatttatgacgatcataccgcagagacaagaatttattacgcgcttgatctcgggaaaacctaccgtttaattgaccagcgcatgcttgagaaagaaaactggacaaaagagcggatcagagagacggccgcatttaatctccgttccctgccgacggttgtcaaagaggatacggttgccggcaattacttttatttcttcagggcaaacgacggatacgacgcaagccggattttgaacgaagcgatcttaaatgaatataagcagcatgcagaaggggagctggcgatctctgttcctcatcaggacgttttgattcttgctgacatccgaaatgaatcggggtatgatattctaggacaaatgtcgatgagcttctttgcaggcggcaccgtcccgattaccgccctatcatttttgtacaatgaaggaaagctggaaccggtgtttatcctggcgaaaagccgtccgaaaaaggattagaaaggatttttacttatgaacgctttttataataaagaaggtgtgggagacacgctcctgatctctcttcaagatgtgacacgcgaacaattaggctatgaaaaacacggcgatgtcgtcaaaattttcaataacgaaacaaaagaaacaacgggcttcaacattttcaatgcgtcttcttacttgaccattgatgaaaacggccctgttgcgctctcagaaacattcgtgcaagatgtgaatgagattttaaacagaaacggcgttgaagaaacattagtcgttgatttatctccgaagtttgttgtgggttatgtagaatcaaaagaaaaacatccgaatgcggataaattaagcgtatgtaaagtcaacgtaggagaagaaacgcttcagatcgtctgcggcgcgcctaacgttgaccaaggccaaaaagttgtcgttgccaaagtcggtgctgtgatgcctagcggacttgtcattaaggatgcagagcttcgtggcgttccgtcaagcgggatgatctgctcagcgaaagagcttgatttgccggatgcccctgctgaaaaaggaatccttgtgttagaaggagactatgaggcgggagacgcatttcagttttagactcccataaatccgccaaaaaaaacgaatcatgtgaaaagccgctaagcccttgtttagcggctttgtttctgctgatagcttaatcttttctgggccgaccagcagtggtatactaaaaaccgtcccagaaaactataagggagttagagataaattatgagttggcttcataaattttttgatttgtttttaggcgaaagcgaagaggatgctgaacgggagacaaaacccgctcaaattccgcagcaacaagaagtacatcatcctgaaggacaattaaaaagattggaagatcctaaaatatattatgaatatccaaaaggcaaattccgttttccagtcgtgcctgacggatacaaaaatcatgacatgagaaggcgccgcacaccatcggacgaaccgaaatccgcgcctcgtccaagtgctgcaccttacagagagcgtcccagaaatgaagaagagcagcatacatatcaagcagcagagccggcgaagaaaccgtttaaaccgacaaatatcccttcgcctgtctatggattcaatcaaaaaccatctgttaaaaaggatgtgccgaaaaagccttctgaaacattgaacgaaccggataaatcggtaaaagagaaggtaacactgctgtcagaagagatcgaacgtgaacgcggctatcctgcatcagacacacaggcgcattccaaaaaagaaagtcctttcttcccggatacccaatttgaaaaacagccttctggcgttttaaacagaaaggatacggagcatgatgaggcgctggcgaaacggccagccgagccgtcaggtaacaaagtgccatttgagtcaggcgttcaacagccggaaaaagaggagcctttcttcccagctgaacaagccgaagagcaaacaccgcctgagatgctcacagatacggcggctgaagggctttcagacagtgaagtaggccgcgaagagcctgcaacggctgaggaagaacaaagggagcagcagtcagagaaatttgaagagcctgttttctccgctgaacttgatgaagagcaaacagctcctgaatctcagacagaggcagtatctgaggatgaaaaagcaaaagagccgtcagacagcccagtatacaatcatcatgaaaacgcggaagaaggtgctgagtccccgttcgttcaagaagaacaaatggaaattcgtcaggaagagcctttatttactgatcatgagtattcatcagaggctctggctcaagcagaaactgtggcaaaagaatcagaagagccatcagacagcataataaataatcattatgacatcctgggagaggctcaggaaacgaagatagatattcagccagacagccatacagagcttgggaaaactgaacacaaggagcagggttccaaatcgttttctgcaactcttgaaaaccggcagggaattcgcgcagacaaacctcgcgaagcttcagaagagccgaaaaaaaggcctggtgtacaggagaaaagcaccgaacaaagcgcatcttctcaaaaaggaccatccgttccttttaatgtgatgatgctgaaaagagatacgcataaacagcaaaaagcagaggagcgccgcggcagctatgtatttccgaatgttgcactgcttgatgtcccgccagcgcaggttcaagatgatactgcgtggatcgaagaacagcgtcagcttcttgatttaaccttgaaaaacttcaatgtccgcgccaatgtggtccatgtaacccagggtccgtctgtcacgagatttgaagtgcatcctgaaccaggtgtaaaggtgaataaaatcaccaacttgtccgatgatattaaactcagtctctcagcgagagatattcggattgaagcgccgattccggggaaaaacacgatcggaattgaagtgccgaaccgcacgagcaaggtggttgatttgcgccaaatgattcgcagctcagctttcaggacaagcaagtcaccgctcacagctgcgctgggattagatatttcgggaaatcctgttgttatcgacttgaagaaaatgccgcatggcttgattgccggcgctacaggctccggaaaaagcgtatgcatcaatacaatattagtaagcctgctttataaagctgacccgagtgaggtaaaggtgctgctgattgatccgaaaatggtagagctggccccttacaataaaattcctcacctcgtcagcccggtcattactgacgccaaagcggctacagctgctttaaaatgggtcgttgaggaaatggagcgccgctatgagctttttgcccattcaggtgtccgcgacattgaccgctttaatcaattaaccgctgaacaccaaatgggtgaaaagctgccgtatttagttgtcattattgatgagcttgcagatttgatgatggtggctccaaacgatgtggaagaaagcattgcgcggatcgcccaaaaagccagagcgtgcggtatccatcttctcgtcgccactcagcgtccgtcagtcgatgtcattacgggtctgattaaggcgaatatcccaacgagaatcgccttttctgtctcaagccaggttgattcccgaacaattattgatatagccggtgcagaaaagcttctcggaaaaggggatatgctctttttggaaaacggctcgggaaaaccggttcgtctgcaaggtaactttgtgtcagaccgggaaatcgaccgcgtcgtttcccacgtcagaagccaaatgccgccgacctatttatttgaacaagaagagctcgtaagacaaggatctgccctgaaagaagaggacgaactgttttacgaagcgtgtgagtttgttgtagagcaaaacagtgcgagcacttcaagcctgcaaagaagattcagaatcggttacaatcgtgcggcaaggctgatcgacatgatggaagcggaaggcatgatctctgaggcaaaaggaagcaagcctcgggaggtgctgatcacagcaagtgatttaataaacgaataatatgggttcattttcacaccaaacatggtatgatagtgtttagagcatttaacagctatgccgctttacagcagctgtgcatagacaaatcttgatatctgggtttaatcggaaagaaataacctgatactaaacataacaaaacatataaaatacgccgctaagggaggcttttcagccgccgcggtcgcaaattgaaatgagcgtcatatactggggaacagatagacgtttgttggaggtacaattatgactgtttatcattttgttggaataaaagggaccggtatgagtccgcttgcccaaatacttcatgataatggatatactgtccaaggatcggatatcgaaaaatttatttttacgcaaacagcgcttgaaaaaagaaatattacgattcttccttttagcgcggaaaatattaaacccggcatgacagtcatcgccggaaacgcattcccagacacgcatcctgaaatagaaaaagcgatgtctgagggaattccggtgatacgttatcataagtttttaggcgactacatgaaaaaattcacgagtgttgccgttacgggcgcacacggcaaaacgtcgactacgggtctgctggctcacgtgatccaaaacgcaaaaccgacgtctttcttaatcggagacggaacaggccagggaaatgaaaacagcgaatactttgtgtttgaagcgtgcgaataccgccgccatttcttaagctatcagccagattatgcgattatgacgaatattgattttgatcaccctgattacttttcaagcattgacgatgtatttgacgctttccaagagatggctcttcaagtcaacaaaggcattattgcctgcggagacgatgagcatctgccgaaaatccatgcaaacgtcccggttgtgtattacggcacgggggaagaaaatgattttcaagccagaaacatcgtaaaaagcacggaagggacaacttttgatgtctttgtccgcaatacgttctatgatacgttttatattcctgcgtacggccaccacaatgtattaaactcattggcggtcattgcgttatgccattatgaagaaattgattccagcatcattaagcatgctctcaaatcctttgggggcgtcaaacgcagattcaatgagaagcagcttggggatcaagtgctgattgatgactatgcccatcatccgacagaaataaaagtgacaatcgaggcggcaagacagaagtatccagatcgggaaattgtcgcggtattccagcctcatacatttacacggacgcagcagttccttgacgaatttgcagaaagcctgagcggcgctgactgtgtgtatttatgcgatattttcggctcagcccgtgagaatgccggaaagctgacgatcggcgatctccagggaaaaattcataatgccaagctgattgaagaagatgacacatctgttttaaaagctcatgataaagccgttctcatcttcatgggagcaggagatatccaaaaatatatgagggcctacgaaaacgtcatggcataataaaaagcagtgatctcactgctttttatttatctgatgggaaagcttattaaaggattttcttacataacggagaatagtatgtatacagcccagtacacatgtttatgattgaagaaaacgggtaaacagcagtatatcctgcagcaaggaggtttgagatgattattattctttatttgagcgttgcactcatcgcagttgcatttctcgtattagtgatctacttgtctaaaacattgaagtcattgcagctgacactaaaaaacgtcgcatccactcttgaagggctggagggacaaatgaagggcatcacaactgaaacagccgagcttttacataagaccaaccgcctggctgaagatattcaggaaaaatcagaaaagctgaacacggtcgttcatgctgttcaaggagtgggagcttctgtacagcagttcaatacatccatgaaacaagcggcagggtctgtatcggcatcagttagagaaaatcaagataagatcaatcaagttgtcacatggagtcaagcagcaatggaaatttgggagaaatggaagcaaaagaaaaaatcagccctgtaagagaaaaaaatactaagaggaggaataatgatgagcaaagatggaattaatagtaaagattttttaatcggaactttaatcgggggaatcatcggtgccactacagctctttttctagcgcctaaatcaggtaaagaacttcgcgacgatctcggcagccaggctgttgctttacgggacaaaactgataaaatgacggcagatgcgaaggaaaaaggcacgcaatatgtcagcatcgcaaaagacaaaacttccaacatcacacagcttgtagcggatcagtctggacagatcatgaacaaggtaaaggatttaagagaccgttccaaatctgacaaaacggattcatcgactgcaatgcaggatatgagggaagaagcgatgcaggcagccgatgaaacaaaagatcaagtcctccagacgaaagaagatgtaaaagacgaactgaaagatgcacaaaaacaggctgagcagttgaatcgctgagcagggaaggaagagcttgagtcatggctaaacagcttattcaatctgaggaagaatttaaacggattgcagaacaggaaggcgttttcgtcttctttaaacacagcaccacatgcccgatcagccaggcagcatttcatgagtttgatgcctttacaaatcagcatgaggatgtgccggcttactatcttcaagtacaagaagcccggccgctgtcaaatttcattgcagaaacatatgaggtcaagcatgaaagccctcagatattcatcatccagaacggtgaagtgaaatggcatacctcacattcacaaattacagaagccgctattgagcagcatttgtcatagaaaaaagcgtccagataacatctggcgcttttttttgtaaaaaacccttgaacattgccctcacatcatgtaggatagcttcatagattactttatcacttaaaagcgtttgggtaataaagtagagtttttataaaattttttgtatttcagtatttccatttggaattacttatagtaagatgcatgataactacaaaataaaaaatgaatgtgcagggaaaggatgaaaaaaatgagcaacacagagttagagcttttaaggcagaaagcagacgaattaaacctacaaattttaaaactaatcaacgaacgcggcaatgttgtaaaagagatcggtaaagcgaaggaagcacagggtgtcaaccgatttgaccctgtcagagaacgcacaatgttaaacaatatcattgaaaacaatgacgggccgttcgaaaattcaaccatccagcacatttttaaagagatattcaaagccggtttagagcttcaggaagaagatcacagcaaagcgctgcttgtctcccgcaagaaaaaacctgaagatacaattgttaatatcaaaggcgaaaaaatcggagacggccagcaaagattcattgtcggcccatgtgcggtagagagctatgagcaggtagctgaagtcgctgcagctgcgaaaaaacaagggattaaaattttgcgcggtggagcctttaagcctcgtacgagcccatacgatttccaagggcttggtgttgaaggccttcaaattttaaaacgtgtagcggatgaatttgatctggcggttatcagtgaaatcgtaactccggctcatatcgaagaagcgctggactacattgatgtcattcaaatcggagcgcgcaacatgcaaaacttcgaattgctgaaagcggccggcgcagtgaaaaagccagtgcttctgaagcgcggtcttgctgcaacgatctctgaattcatcaatgctgctgaatacatcatgtcacaagggaatgaccaaattatcctttgtgagcgcggaatcagaacatatgaaacagcaacgagaaacacgctggatatttcagctgtgccgattttgaaacaagaaacgcatttgccagtctttgttgatgttacgcattcaacaggccgccgtgacctcttgcttccgacagctaaagccgctttagcgattggtgcagatggcgtaatggctgaggttcaccctgatccgtcagtcgcactttctgactctgctcagcaaatggcgattcctgaattcgaaaaatggctgaatgaactgaagccaatggtgaaagtcaacgcttaattgaacaatccaaaaggccgcgcctgcggcctttttttatgctttctcgtttatttagttataaaaaccaagtatacgttttcatcatctataaaaacgtgtataatttcatgagaagtaattaaatttgatgaataatgaaaaataatgtacactactgacttacgcttacaaatcataaacgacataaattcggacattatgacatttctctacataaagtgtttatgctatagataaggataagtgtatccagtaaaaggagtggttttaggatgagcaatattacgatctacgatgtagcgagagaagctaatgtaagcatggcaaccgtttcccgtgtcgtgaacggcaacccgaatgtaaaaccgacaacgagaaaaaaagtcttggaagccattgaacgtctcggttaccgtccaaacgcggtggcaagaggactggcaagtaaaaaaacaacaactgtaggtgtcatcattcccgatatctcaagcattttctattcagagcttgcgcgcggaattgaagatatcgcgacaatgtataaatacaatattattttgagcaactctgaccaaaacatggagaaagagctgcacttgttaaacacaatgctcggcaaacaagtggacggcatcgtgtttatgggcggaaacattacggacgagcatgtggcggaatttaagcgttccccagtgccgattgtacttgccgcttctgtagaagagcaggaggaaacaccgtcagtcgctatcgattacgaacaggcgatttatgatgctgtgaagcttttggttgataaaggacatacagacatcgcgttcgtttccggaccaatgacagaaccgatcaaccgttcgaaaaaactccaaggctacaaacgtgcgcttgaagaagcgaaccttccgtttaatgaacaatttgtagctgaaggggattacacatatgattccggactcgaagcactgcagcatctgatgagcctggataaaaaaccgacagccattctttctgcaactgatgaaatggcactcggcattatccatgctgctcaggatcagggcttatccattccggaggatctcgacattatcggctttgataatacaagattaagcctcatggttcgtccgcagctttcaacagttgttcagccgacatatgatattggcgccgttgcgatgagattgctgacgaagctcatgaataaagagccggttgaagagcatatcgtcgaactgccgcaccgtatagagctaagaaagtcaaccaagtcataagaaaaacaaagagcaagcttcacctttatggtgaattcttgcttttttcatggggagaaatgatgaaacgttttgattatcttacacctgttggatttgtgttaggaacgattattattgttatcgggattatttcaggatcgggagtaagcggtttccgctcttttcttgatctgacctctttcttcatcgtaacagggggactttgcgccgctgtttttatcagttttccgccaagagagctgaaaaaagtgccctctgtgttaaagcaggcattcatccgccaggaagacaatgtgaaagatcttgtgaaaacctttgtttccctttccgatcacgcgcgaaaacacgggcttttatcattggacgatcaggctcgggaaatcaaagatccattcttgaaaaaagggctgcttttagcgattgacggctgggatgaagaaacgattcggctcgtcatggattcagaaatcgcagcaatggaggaacggcaccgaaaagggcggcgagtttttgaaaaagcgggagaattcgctccggcatggggaatgatcggaacactcgtcgggcttgtgctgatgctcaaaaacttaaacgacccgcatatgctcggaccaaacatggccattgcgcttctgacgactttatatggttcattactggcaaatatggtcttcaacccgatcgcggctaagcttgaagagaaaacagaaagtgaaattttcatcaagcaggtaatggtggaagggattatcggtgttcaatccggaaaaaacccgcgcaaccttgaaagccagctggtcgttttcagctcacgggaagaatggcagaagcagccaaaacaagtaaaaacaaaaaagggatctgtacatgaagcttagaagagaacgttttgaaagaaggaatggaagcggaaaaaacagtcaatcttcatccagctggatggtaacctttacagatttgatcaccttgatccttgtgttctttattttactcttttcgatgtcccaaattgatctgcaaaaatttaaagcggcagtggactcgatccagaaggaaggcaacgggcttcagccggaccaaacatccatagaaaaaaagaatacatccccatctgatacgaagaagcaagaggatcagcaggatcagcttctcaagaaagtaaatacatatataaaagacaattatttgaaggcccaaatgacagccaaacgggatgaacgcggtgtcgtgctcgttcttcaggaggctgtgctgtttgatacaggtgaggcaaaggtgctgaaaaatgccgaaacacttcttcaccaaattgccgttcttcttcaaaccattccaaatgacattcaggtggaggggcatacagacagccgaaacatttcgacataccgatacccgtcgaactgggagctatcagcagcacgggcaagtggggttattcaatacttcacgtctaaagagaagcttccctccaagcgctttattgctgtcggttatgcggatacaaagccagtaaaggataacaagacaaatgaacacatgaaggaaaatcggcgtgtggaaatagtgattaaaaaatcaaaaacgacctcttcgtaaaggtcgttttttactttgttctttgctgttcagaacgtatcgcatataatgctttgctgacagtttgggcatttttttctgtgatttcaggcttgcggggaatcggaggatataaatcagccggatcgctccagctcgacggaagggccacggggcattgtttttgccatttagcaatccattccggcgggatctcgtgtcccgggtcaattcccttcatttcaagccatattctggcccaggcgcggggcacgacgcgccaaatatcatatccgccgcctccgactgcaatccatttccctccgcaatattgatgagccaaagtgtgtgcaagacgggggatttcttcgtatatattgattgttgctgataaatgcgtcagcgggtcgtagtaatgggcatcggcgccgttttggctgataatgacatcgggcttgaaataagcggcgacttctgaagctgctgtccggtaagcctcaagaaaagaatcatcctctgtaaaagcgtcaagcgggatattaaaggaatagccatatccttttccgctgcctttttcttggatctgaccggttccagggaataaataccttcctgtttcatgaatggacagcgtgcatacgtcaggattatcgtaaaatgtaaattgcacaccgtccccgtggtgggcgtcggtatcaatataaagtaccctggatctgtattttttctggatatattgaatcgccacagcgctgtcattatatatgcaaaaccctgaagctctcccacgaaagccgtgatgaagccctccgccaaggtttgccgcatgcagggcttgtcctgacatgacccagtctgcggccgttaaagtgccgcctaccaagagtgatgccgcttcgtgcatgccggcaaagacgggtgtgtcttcagtgccgagcccgtagctttctccttcttcagcgggaagctttccggcgcccgcaagctttacggcctgaatgtaatcgtccgtgtggacaagggaaagctcctcttctgaagcgagtctgggggtgacaatgtctccatcatcaaaggcattgatcgtcttaagcaaatcatatgttaacagaacccgctgctgattaaagggatgctcctgatgaaacatataggtttggtaggatggagaatagataaatacactgtctctcatagcaggtccctttgctctgacggccatacgacgtggtgtccatttctttgtaatgcctgcaaaaacggcagcggattcatcgtttttacacggaagacaagcacttttacaccgggatcgtcatgcggataaacaagcacgcttaatattttcacttgaaggtcttggcaaagactgctgatctcagcgaggcttttggtgatgtcgtttacttttatctcaatttgcgatcccggctggtcagcgcctgtcaatttgataaacgtccgcagcaaatcggtttttgttaaaatgcctattaatttttgatggtgtaccactggaaggcagccgatgccatgctcgtagaacacggctgatatttcttcgacaaaatctaacggatgggagcagacaacatcctttttcataattgaatctacgcttcgtgtgagaaataggcttcgtttgttttcttcaaaaatactcgggctggcctgtttcatgtctctgtctgtaatcatgccgatcacgtgtcgttcttcatctacaacaggcagatgcctgatatggaattccttcagtttgcatattgctgtttcaagcgtatccgtcttcgttaatgtaatgacatctcttttcatgatttgctcaacaatcattattttttcccctttgccagtgtcagttaatacatataacgatgataaaaacggagcctgtcaaattgctcaattgattcttggctgacgttttttccaatgcgggccatcagacagtttgcagggtgggagctgatctccggctcatccgttgcaaaccagaccaatccgcctgcattcatcatcttttccatgatctttctgtattcccacacatcttttttcatcccttttaaatcccaatgccagtaatattctgtcgtcatcacaatgtagttttccatttgttcatccatcatgctgacggtcaggagcgtctttccgacagcgcatccccgatagtccggcgctacttcgatggctccgagctcaatcaaatcctccatatttccttcagaccatctttcgagcgggtcaggatataaatacgtgacatagccgacaatggttcggccgtctctggcaataataatgcgcccttcgggaaggcctgcaatgtcgactagcgcttcatgctgctcgcgaggcgggcgaaatgcggttaaatctttatgaaactcataacctgccaaatcctctggagagacaggcccttctatcagtaaagagccggttgctgttttgatgtttgctgaatggtatgttttatgatgttccactaattcaccgtcccatcaattcttatcaaaatacatgccttctttaagaataccaaattataaagcgttttcaacatggtttatattttaaaaattgagaagaatatgaatatatactataataattgtgacaacttcagcaaagggggatgtttgggcatgaatttgaaagcgttaccagcaatagagggggatcataacttaaaaaactatgaagaaacgtaccggcattttgattgggccgaggcagagaaacatttctcttggcatgagacagggaaactgaatgcggcgtatgaagcgattgaccgccatgccgaatcgtttcgaaaaaacaaagtagcgctttattataaagacgcaaaaagggatgaaaaatacacatttaaagaaatgaaggaagaatcaaacagagccgggaatgtgctgagacggtatggaaatgtggaaaaaggggaccgcgtttttatttttatgccgagatcacccgagctttattttattatgcttggcgcaatcaaaattggcgccatcgccgggccgctgttcgaagcatttatggagggagcggtgaaagatcggcttgaaaacagtgaggcaaaggttgttgtcacaacacctgagctgctggagagaataccggtagacaaactgcctcacttgcagcatgtcttcgtagtcgggggagaggctgagagcggcacgaatatcatcaattatgatgaagcagcgaaacaggaaagcacaagactggatatcgaatggatggataaaaaagacggctttctgcttcactatacatcaggttccactggtacgccaaagggcgtgctgcatgtccatgaagcgatgattcagcaatatcaaacaggaaagtgggtccttgatttaaaggaagaagacatttattggtgcacggctgatccaggatgggtgacaggtacggtatacggcatttttgcaccgtggctgaacggagcgacaaatgtcatcgtcggcggacgtttcagcccggaaagctggtatggtacgattgaacagcttggcgtcaatgtctggtacagcgcgccgaccgcttttcggatgctgatgggagcgggagatgaaatggctgcgaaatatgatctaacttcactccggcatgtgctcagtgtcggtgagccgctaaatccggaagtcatcagatggggacataaagtttttaacaaacgaattcatgatacatggtggatgacagaaacgggcagtcagcttatctgcaactatccttgcatggatattaaaccgggttcaatgggtaagccgattccaggagtggaggcagcgatcgttgacaatcaaggcaacgagcttccgccgtaccgaatgggcaatctcgccatcaaaaagggctggccttccatgatgcataccatttggaataaccctgaaaagtatgaatcgtatttcatgccgggcggctggtatgtgtctggggattctgcttacatggatgaagagggatacttttggttccaaggcagagttgatgacgtcatcatgacctccggtgagcgcgtcggcccatttgaagtggaaagcaagcttgtcgaacatccggctattgcagaagcaggcgtaatcggaaagcctgacccggtgcgtggagaaatcattaaagcttttattgcactcagggaaggatttgagccgtctgataaactgaaagaagagatccgcctatttgtaaagcagggtcttgcagcccatgcggctccgcgtgagatcgaatttaaagataagcttccgaaaacccgaagcggaaagatcatgaggcgcgtgctgaaggcatgggagcttaatctgccggctggagatctgtcaacaatggaggattaaaaggcggcgttgacacaggattttatttatgttaaaaatgatatagcttcatatgaaaaggtaaagattgagacaagtagaatatccttacgttccagagagctgatggccggtgaaaatcagcacagacggatatatcgaatacactcatgaaccgcttttgcaaacaaagccggccaggctttcagtagtgaaagaacggacctgatccgttatcaggcaaagtgataagacgaatgtttgcattctcttattagtagggtggtaccgcgataatcaatcgtcccttcgtgtaaacgaaggggcgttttttattttaatcaaaaaaggagctttatcttatgactaacttacttgaagacttatccttccgcggattgattcagcaaatgacagatgaagaaggattaaataaacagctgaatgaagaaaaaatccgcttgtactcaggctttgacccgacagcagacagcttgcatatcggacacctgctgcctattttaacacttcgccgttttcagcttgcagggcatcatccgattgcgcttgtgggcggcgcgacgggcctcatcggtgatccaagcggaaaaaaagcagagcgtacattaaacactgctgacatcgtatccgaatggtcccaaaaaatcaaaaaccagctgtccagatttctagattttgaagcagcagaaaacccagctgtcatcgcgaacaactttgactggatcggcaaaatgaatgtgatcgatttccttcgtgacgttggtaaaaatttcggcatcaattacatgctggcaaaagatacggtcagctcaagaattgaatccggcatctcgtacacggaattcagctacatgattcttcaatcttatgatttcttaaatctttacagagacaaaaactgtaaactgcaaatcggcggaagcgatcagtggggcaacatcacagcgggtcttgaactgatcagaaaatcagaagaagaaggagcaaaagcgttcggcctaacgattccgcttgtcacaaaagcagacggcacgaagttcggaaaaacggaaggcggcgcgatctggcttgataaagaaaaaacatcgccatatgaattctatcaattctggatcaacacagacgaccgtgacgttgtcaaatacttgaaatactttacgttcctttcaaaagaggaaattgaagcgtacgctgaaaaaacagaaacggcgccagaaaaacgtgaagcgcaaaaacgcctagcagaagaagtgacatcacttgttcacggacgcgaggcgctggagcaagccatcaacatctcccaagcgctgttcagcggcaatattaaagagctttccgctcaagacgtaaaagtaggctttaaagatgttccttctatggaagttgacagcacccaagagctttcacttgtagatgtgttggtgcaatctaaattatctccttctaaacgccaagcgcgtgaagacattcaaaacggagctgtttacattaacggtgaacgacagacggaaataaattataccctatcaggtgaagaccgtatcgaaaatcaatttactgttctgcgccgcgggaagaaaaaatacttccttgtgacgtataaataagaaaaagatcctttgccactgaaggcaaaggatctttttgtttaccgcataggaatgaaaggaaaagagtatattagatagggcaaacacgaccaatcaccaccttttaaatgaaaggagcgctaaagtgtgaatctcatgtgtacgattgcaaaagaacggctgcagcaggattactgggatcagcaggcgcaagatagtgttggccagcaagaggcgaatgacgaaacagacgataaaaaaaccccgaccgcatagcggcaggggtttttaaaacgattaacgagagtagaactcaacgataagcgcttcgttaatttccggagcaagttcagaacgctcaggaagacgagtgaaagtaccttcaagcttttcagcgtcgaaagtaaggtattcaggaacgaagttgttcacttcaacagattctttgatgatagaaaggtttcttgatttttcgcgaacaccgattgtttgaccaggtttcacaaggtaagacgggatgtcaacgcggcttccgtctacaagaatgtgaccgtggttaaccaattggcgagcttgacggcgagtacgtgctaaacctagcttgtacacaacgttatcaagacgagaatctaaaagaatcatgaagttttcaccgtgtttaccagctagtttgccagctttgtcaaacaaagtgcggaattgacgttcgtttacaccatacatgtgacgaagcttttgcttttcttgcaattgcaaaccgtattctgataattttttacgttgtcctggaccgtgtggacctggagcgtaagggcgtttttctaattcttttcctgtaccgctaagagagattcctagacggcgggacagtttccaagatggacctgtatagcgagccataatgtgactcctcctttggttttatttttgtggaaaataaaaaccgtctgctctattcgaccatgcacattttgttttcatgtatcctcgctccagcagcagagagttacacgatacaccttattgataaggaacaaaatgaaaacatagaagctgaacaaaaaggctgcaatatttcacacaaaggtcattatataatttatttgttttgaagtcaaccattcctccattattgcttcaccgtttatgatataataaacaaaaattagtggtaaacttttaggtgataaaaatatggtagaacaaactaaagatcaattatccgcctttcattatcatatgctcgattttttattaaccaaatctgaaaaagtcacattcaccgactctttcatatggctgacttcggctattcaaacctatttttcaaccctttgtgtttcgcttacaccgtcaccatcaggctttgtgacaaaattggcagatggtgaagcgcgtttttccgcttcaaaaataaacgcttcatgttatctgattgaggacggctccggcaggcgttttcatcttgcgtgcaggcaggatgaagagattcctgaagggcttccggacgtggttgcttcatttttaaaccagtcgatgaaacaggaaagactctataacaaaacgatctaccaaaaaaagatatacaaaatgacagagctgttccattcactgcttgatcagacagatgtgctgaagcagcttttagaaagcttgaccagcacattttctctttttgagttttctttatttatatcgcacgatcaagaccaatgtttagggatacctgcaaaagagctgtatatggaaggggaaaaatccgattcctttgcgctcaaagtgtatttgtccggagacattttgcggaaaaatgaatctgtcgcctatattccgatcaaaggacagcagggcacatacggggtgttgaaggctgagggaacgggtgacagctttcttactgatgcctgccttgatgaaatgtcgctgttagcaaacgcggcgggaaaagcgtttgaaaatgcccagctctacgaacaatccaaagcaagcatcgcaaatttggaattgattaatgaaacatcacgccgcctgaatcagcggctgacactgactgatacaatgaatgatctggctgtgagaatggcagaatcgtttcaggcagaagaagtgggattttttcatatagaccattttgaaaacctaacattgcttccaggcagcacagcattttttaaagaagcgaaaccgtcagatttttataatgagctgaaagaaaagctgtatgaaggtgaaaaaggggttttcatcgggaatggccagtctgtttttgggaaggcggggtacggctcgctgatggctgctccgatgattcaaaacgaccggcttctgggcttcgcggttttattgaaacaggagctgtacgcttttacatttgaaatgtacaagctgtttcaggcgctgattcatcacgcgacactggctgtaaccaattcaatgcttcgcgaccgtcttgagcaccttgtgaaaacagatcagctgactgaactgtattcacgagtgtatttagatgaaaaaattcaatacagcatgaaaatccaccaaaagggtgtttttattcttgttgatattgataattttaaaaatgtaaatgatacgtacggccatcagactggggacgagattttaattcaagtcgcttcagtgattaaaagcaacatccgaaagcatgatgtcggtgcccgctggggaggagaggagctgacgatttatttgccaaatgtgccggttgcagtggggaaacggattaccgagcgactggtttacgcggtcagaaaaaatacgaaacccgaggtaaccatttcctgcggtatctcctgctggacgacagaaacaaaaaagtcgctgaaagagcttgtgcatgaggcagatgaagcgctctacagcgcgaaacggagcgggaaaaaccgcttgatgattcatgactcaataaaataaaaaaagcccaaaacgatatcagttttgggcttttatattactgcgctaacgctttttctagcgtttcggcaaattgagttaagtatttttcatcaatttcgtcgaaacggtttttcactgggctgtcgatgtccaagacgccgacaatttttccgtctacacgaatcggaagcacaatttctgattgagacgctgcatcgcaggcgatatgtcccggaaacgcgtttacatcctcaatacgttccacttttccgtttgcgtacgctgtgccgcaaacccctctgccgaaaggaatccgaacacatgccggcaggccttggaacggacctaacacaagctgtccatcctcttctttggcaaaatagaaacccgcccagttgacttcaggcagcgaatgatacagcagtgctgaggcatttgcatagttagctatttggtctgtttcgtcttcggtcatggcttcgagctgttttagcagaagctgatagtctttttctttatctccagattgtttttcgacatggaacatggaaaaccctcactttttctataatataaaacaaagttccggcttttctgccggcatttgtcgataagttcttacaggaacagcggctttctgcttgaatagtatcaagaggaaggagtgagccgtatgaaagtaagcaccaaagacaaaattattgaatctgctgtcatgctttttaaccaaaaaggattttctggcacgtctgtccgtgaaatcgcaaagtcagctgatgtaaatgttgcgcacatctcctactattttaaaggcaaaggaggcttgatggaacacttagtttcagagttttacgaaggctacagcaaaacgcttgaaacagcggcaagcaatatctctactcaaagcacgcaggaacagcttcttcaattggttttcgatattttatcctatcagcataatcatcgtcaattaactcgttttgtctaccgggaagtcacaattgactccacattaatcagggaaattatgtcgacatatctaatgaaggaaaagtatatcttccagctgatcattgaggaaggagaaaaacagcgtgaatatttaacgctgccgctgcctcattttattctccaattaaaatctctcttgatgatgccctatctccagcctcaatatatttcagaagtactctacatgcagccgcacgagccgtatttttataaaatgtattttgaagaaatcaagatttggatcagaagcgtcttccggacaggagacgtggcgctcaccaactagcaccgttccaaaaacgcctcatacgcatatccgacatctcccgcttgatgggcatcagacccaaacacaagcgggatcttcttttgcttcgcttcattcagcatccaatcctcgatataaataccgccagcgtaagtttttcttaagccggaagtattgaagtcgagctccattccgttttcttcaatggcattcaggcacagagaaatgaggccgcgaatatgctctgacatgctgtatggaaacagcttgatgaatttttggacgagtgtgatgtgaccgactctttttggcttataaacgccgagagatgctacaatggaagaatagatactccggtaatattgttcatataccgcttcaatgcttccgcaggctgaaatcagctctttgaaggtatgctcgtcataatcaaggcatagataggaagagtctgtgcgcaaaaaatgaacggataagatgctgtcatctaaatatggcccgtatgtgtctaggaataatgtaatttcgtcttcaaattcagcgatataatcgacttcaagccctgtccgtatgctaagctgtccgcgatattctttttttaatccggaaatttcatgaatatagcgttccaaagaagcttgcgccatcgcgctgtctttcagcggcgtgggatcggtaaaagatggcggcaatggggcgtgttcggtaaaagtaatcgattcgaaccctttttttaaggcttcttctgcatattgtctgagtgtgtcattggagccgtgagggcaaaatggtgtgtgaatatgtccgtctcgcttttgcattgatgtcaccccatgaaaaaatagtcaaatcctgccgattttgcacaaaaagtttttgatttctggtcaaaaaatgtttgttacatggtatcataataacaatgaaaacgacagtttttctcaatacatatcctgaaatctttctgaataaataaaacaccctgacagattaaggtaaacagcaagggggctcattatggagtttgtcattggattattaattgtactgcttgcgctgtttgcggcaggctactttttcaggaaaaaaatctacgccgaaatcgaccggctggaatcgtggaagattgaaattctgaatcggtcgatcgtggaagaaatgtctaaaataaaacatttaaaaatgacgggtcagacagaagagttctttgagaagtggcgtgaagaatgggatgagattgtcacagcccacatgccgaaagttgaagagctcctttatgatgccgaggaaaatgcagacaaataccggtttaaaaaggccaatcaagtgctcgttcatatcgacgacctgctgacagcggctgaatcaagcattgaaaagattcttcgggaaatcagcgatcttgtcacaagtgaggaaaagagccgtgaagagattgaacaggtgagggagcgctattcgaaatctcgaaaaaacctgctggcttacagccacctttacggggagctttatgacagccttgaaaaggatctggacgaaatttggagcggcatcaaacaatttgaagaagaaacagaaggcggaaactatattactgcacgaaaagtactgcttgagcaggaccgcaatcttgaacggcttcagtcatacatagatgatgtgccgaagctgttagctgactgtaaacagacggtgcccggacagattgcaaagctcaaggatggctatggcgaaatgaaagaaaaagggtacaagcttgagcatatccagcttgataaggaattagaaaatctgtcaaaccagctgaaacgagcggaacatgtcctgatgactgaactggatattgatgaagcgtccgcaatcctgcagctcattgacgaaaatattcaatctgtttatcagcagctggagggcgaagttgaagccggtcaatccgtactaagcaaaatgcctgaattgattattgcttacgacaagcttaaagaagagaaagagcatacgaaagcggaaactgagctggtgaaggaaagctacaggctgacagccggtgagctcggcaaacagcaggcttttgaaaagcgccttgatgaaattggaaagctgctatcatccgttaaagataagcttgatgcagagcatgtcgcctactcacttttagtagaagaagttgcttcaatagagaagcaaattgaagaagtgaaaaaagagcatgccgagtatcgtgaaaatctgcaagcgctgagaaaagaagagcttcaggcgagggagacgctcagcaatttgaaaaaaacaatttctgagacagcaagactgctgaagactagcaacattccaggcattccgagccatattcaagagatgctggagaacgcgcatcatcatattcaagaaacggtcaatcaactaaacgaacttccattaaatatggaagaagccggagcccatttgaaacaagcagaagatatcgtcaacagggcaagccgggaatcagaggaacttgtcgagcaggtcatcctcattgaaaaaatcattcagttcggaaaccggttcagaagccagaatcatattttatctgaacagctgaaagaagcggaaagacgtttttatgcttttgattatgacgactcttatgaaattgccgctgccgctgtagaaaaggctgcgccaggtgcagttgaaaaaatcaaagctgacatatccgcttagataatcacgaccatgaaaaagagcccgcagtgtaatgagcaggctctttttttattacaaaacgcctgcgcaataacgcaggcgttctgtgacattaacttatttcattaagctgtttggatggtccgatgaataaggtcagcacatagccgataaccgctccgacgattcctggaagcacccagccgatgccgaggctgtaaagaggaagattcgcatttagaaacacatctaaagatccaagtgaaaaaccggctgctttgataccgtctaaaatactgaaaagtcctgtaccgatcaagcatgcgatgtacacttcgcgtctttctttaaagatcttatcgatgaaggaaagaacgataatgacaatggcaagcggatagatagctgataaaataggaacagaaaacgcgataatttgcgcgagtccgaaattcgcaatgatcaagctgaataacgtgacaatcgtaacgacaattttatatgataatgccggaataagttttgaaaaatattggccgcaagatgtgacaaggccgatgcttgttgttaaacatgcgactgtaatcgctgctccgagtacgatgttgcccaatgaaccgaataaataatgggaagacgcagataaaattttagctccttcaccaacaggaccaatggcatttgtgcttgttgcacctaaataagcaagggatacataaatgaaagtcaggcctaaagcggcaatcacacctgctttaatgcaggctgcagcaagagctttagactgtgtaacgcctttgctttttacagcatttacaacgacaacgccaaatacaattgaagcaagtgcgtccattgttttatagccttctaaaaatcctttaaaaaccggtgttcctttatatgcttctgtcacggcgcccaatccgcccatcggcgtgaagatggctttgagaacaatgattaaaataattgtgaatttgatgggagtcagaatttttccgactcgatccacaaccttagatgggtttaacgctaaatagtacgtaacgccgaaaaagataagtgtaaatattaataaagaaagtctttctggtacaccagtcaaaaacggaacagcgccaatttcatatgaaacagttcctgttctcgggatggcgaataatggtccgattgataaataaagcacgacagtaaagattgtgccgaaaacagggtgcgctttgtcagcaaggcctttagcgtccttaccggttaatgcgatggcgataatgccgagaagcggcaggcctacccctgtcagtaaaaatccgccgatggccttccagacgttgtgtccggctgcttgtccaagttccggcggataaatcatatttcctgctccaaagaataacgcaaatagcatgaaaccaataataatggtatctttgacaggcagtgagtgtttcatgaaaaaaatcctcctaataattatgttaaaatattctgtcaattaattgtcagataatatgacgaaacgaacaaatcttattatatggtaaaaaaattagaagtcaatactagtttttcgtaattttctattaaattttgttatggtaacataaatatcataccttgtaccgctttcataaaggagtaaaaaagatgatatatttagataatagttcaacgacgaagccttacgatgaagtcttgaacgtatatgaacagacgagcagccgatactttggcaatccttcatctttgcaccgatatggagccgaaacggaacagctgcttcaagcagccaaaaatcaaatcaaaaggtccttaggcctaaaaaaatatgatattgtatttacgtcaggcgccacagaagccaataatgcggctttaaaaggagcggctttgtcaaagataaaaacaggcaaacatatcattgccacttctattgaacatccatccgttacggaatcgttagaacagctgaaagagttgttcgggtttgatatcacttatctttctgtgaatgaagacggatttgtttctattgaagatctaaaagcagccatccgtcccgataccgtgcttgtcagcatgatgcatgtgaacaatgaagtcggttccgtgcagccgattgaagcggcaggagaagtgctgaaagagcattcgaacattttgtttcacgtcgattatgtgcagggcatctataaagtgcccttggcaattgaaaaggccggcattgatctatgttcaatttcggggcataaatttcacggcctaaaggggacaggcgcacttattgtaaaagaaggaacacgccttattccgctcataacgggaggctctcagcaaaaaggcatacgggccggaacagaacatactgctggtgcggtttcgcttgccaaggccattaatctggcctctgctgattttgacacacggcttgacacgatgactgccgtaaaggaattgtttatgaataggctgagtgaaattgagggcgtcgttatcaacacgcctcaaatgaatagcgcgccgcacattattaatttctctgtaccggggattaaagcggaagtgcttttacacatgcttgaggaacaggatatattcgtctccacaacatcggcttgctcggcaaaagaacataagcccagcaaggttctcttagagatgggcaaaggagagcagattgccggaagcagcatcagaatcagtttaaattacagccagacaagcgatgtggcagaaccgtttatgaacgcgcttcgtcctggcatcaaaaaattaagggaaatgatgaggtagaacatgaattacgatcatatattaattcgttttggggaaatttcgaccaaaggcaaaaacagaaaaagctttattgagcgcttaaaacaaaacatcagactcgttttgaaagactatccgaatttaaaatacttttccaacagggatcgtatgacgattacattaaatggagaggatcctgaggctctttttcctcatttaaagcaagtgtttgggattcaaagcttcagcctggcaattaagtgtgacagccgccttgatgatattaaggcaaccgcactaaaggctatcaaagatcagtataaaccaggtgatacgtttaaagtcgcgacaaagagagcgtataagcaatttgaattagatacaaaccagatgaacgctgaaatcggcggccatattttgcgaaatacagaaggattgacggtcgatgttcgcaacccagacatcccgctcagaatcgaaatcagggaagaagcaacatttttgacaattcgtgatgaaaaaggtgcaggcgggctgccagttggttcagcaggaaaagcgatgctgatgctttctggcggttttgacagccctgtggccggtttttatgcgatgaaacggggattgtcggtagaagctgttcatttcttcagcccgccatacacaagcgagcgcgcaaagcaaaaggtaatggatctggcgaaatgtctgtcccgttttgggggaagcatgacacttcatattgttccatttacaaaaacgcaagagctcatccaaaaacaaattcctgaaaattacacaatgacggcaacccgccgcctcatgcttcagatagccgacagaatcagagaaaagagaaacgggcttgccattattacgggagaaagcctcggtcaggtagcgagccaaacgcttgaaagcatgtatgcaattaatgcggtgacgtcaacaccgattttgcgtccgctaatcgccatggacaaaacagaaatcatcgaaaaatcacgggaaattggcacatatgagacaagtattcagccgtttgaagactgctgcacgatctttacaccgccaagcccgaaaacacgccctaaaaaagagaaaattgaacactttgaaagctttgttgatttcgagccgtatattcaagaagcggtagataacattgagacaatgaccctttatagcgaacaagaagctaacgataaattcgctgaactcttttaaatcaattttcagctcctgtatacaattaccaaagtttttctgaatgaagccatgtgttttgacacattctatactcacaaggaggtgagacacatggctaacaataactcaggtaacagcaacaaccttttagtaccaggagctgctcaagcgatcgaccaaatgaaattagaaatcgcttctgaattcggtgtaaaccttggagcagacacaacttctcgcgctaacggttctgttggaggagagatcacaaaacgtcttgtatcttttgctcaacaaaacatgggcggaggacaattctaatttacaatttcacataatggcttaggagtgggggtatccccactctttttcattttttacatataaaaaaggaccagcggcctataaaatctatgtttacagaggttgcttttaggcatatccttacggaaagagcctgtatttatgtataatgggtggagaaagtgaggagttgttcgtgttaaaacgtgaagatttaattgcccctgtgcaatataatttagtgaatgaaatggaaaagttcagtgctgctggacaaaaaaccgctcttctttgggaggacgagtcgggcaagcaagaatcttggtcgtatgaaaagctgatggaagaaacaaataaaatcggagcggccttagctgatcttggatttaaaaagggagacaagctgattgtaatggttccgcgggtgcttgaagcctatgctgtttatttggctatcctgaaatcaggaatggttgtcattccgtgctccgaaatgcttcgcgcgaaagatcttgaataccggattgaacatgcagaggtaaaaggcgctatcgtctactccgaatttattggcgctttccgggatgtcagtacggctgacaaactgattacactgtctattggtgaaaatgatgccggctggaaaaacctcttatcaattgaagcggacggaagccaatttaaaacagctgacacaacaagagatgatatggctttcttatcttatacatccgggacaacaggtcagccgaaaggtgttgtacatacacatggatgggcatttgctcatttaaaaacttctgccggcgcttggcttgacatttctgaaaaggatatcgtctgggcaactgctgcccctggctggcaaaagtgggtatggagtccgtttttagcggtgcttggcagcggagcaaccggttttgtgtaccacggcagattcaaagcagaaaaatatctagagcttttaaatcgctacaaaatcaatgttttctgctgcactccgacagaataccgcttaatggcgaaggttgaaggcttgaaacgctttgatctttctgccctgcacagcgctgtttccgcaggtgagccgctcaaccgtgaagtcattgatgttttccaaaagcactttggcattaaggtacgggacggatatggccaaacagaaagcacgcttttggttggtgttttgaaagatacgcctattaaaccgggaagcatgggaaaaccgacaccgggaaatcaggtggagatcataaatgaagacggtgaaatctgcaaacctggtgaggttggcgatatcgctgttcacctcagtacgcctgcgctctttaaagagtattttaaagatccggaaagaatgaaaacacaaattcgcggcgattatttcctaacgggagacagagcaagaaaagatgaggaaggttacttctggtttgaaagccgaaatgacgatattattatcagctccggctatacgatcgggcctttcgaggtggaagacgcgcttgttaagcacccagaagtaaaagaatgtgctgttgtcgcaagccctgatgaaatcagaggctccatcgtaaaggcatatgttgtcctgcaaaatcatgaaaaacgcagtgatgagcttgtcaaaatgctgcaaaaccatgtgaagacgattaccgctccatacaaatatcctagagaaattgaatttgtggaaagcctgccgaaaacggcttctgcaaaaatcagacgagtggaattaagaaaacgtgaagaacagctcaaagccaataaaaaggcgtaaagaaagagagtgaacgtgaatgaaggcgatatggcacggcggtttcatttatacgatgctcgaagaaggcgatcggactgaggcagtttatgttgaggatggtgttataaaaggcaccggcagctatgaacgtttgaaggaaaagtacgggtcgccggaaacagaagaaatcagcctgaacggagcagtgatgttccccggttttgttgacagccatctacatttgatcggccacggtgagaaacagcttcagctcgatctgtccgcactgacgtcgaaagattcaattttacaggctgcgaaggaaagagagcggcagcttcctaaaaacgattggctcattggagaaggctggaatgaaaatcagtttgagacacctgactacttgactaagcatgatcttgatcgcctgtttcctgacaggcccgtcttgctcaagcgtatatgccggcatgcaatagctgtcaattctgcggctcttcaagcagcgggaatttcaagaaatactcctgatcctgacggcggagtcatcgtaaaagatgcaaatggcgagccgaccggactcctgtttgataaggcgcaggatttgattctgaaggctgtcccgccagtctcccagcactatgttgatgaggcattaacggctgcaataaaggattgctggacaaaaggcctgacgggcggtcattcggaagacttgtcctattatggtgatgtttcggtgccgatgaaagcttatgagaaagctgccgctggcggaaagtatccgtttcgctgccatttgctcgttcatcatgaagctgtcgatcgatgggagcagctggagaagctgtccggcccgtatgtggagttcggtgctatgaaaatctttgcggacggggcgcttggcgggagaacggctttattgaaagaaccatatcaggatgatccatcaacaaatggtgttcaggttcacgatgacgaaacccttggccggctcattcgcaaagcgagagaaaaagggatggaggttgctgttcatgcaatcggcgatcttgcttttgaaaaagtgctgaacgcaatagaaaagcatccgcccaaaaacggccggcatgatcggcttattcatgctcaagtgcttgataacgaattaatcgagagagcagcacgcatgccgatcgcacttgaccttcagccgcacttcgttgcaagcgactttccgtgggtcattgaccgtctcggaaaagaccggatgaagactgcatttgcctggaaaaccctcatatctaaaggcattttatgcgcgggcggttcagacgccccgattgagcctgttgacccgcttctagggatccagtccgcggtcctccggaaaagcagtcatgagcaaaacgggccaagctataatgaaagtgaatgtttacctgtatatgaagcgataaagctttatacagaaggtagcgccggtatcatttataaagagaagtcacgcggaaaaattgcggaaggctatgacgcggattttacagttctcagtggtgatccgtttgccattgaccccgcacagcttcatcttttagagattaaaaaaaccgtgattaacggccagattgtatatgagaaatcataaaaggacaggcagcagcctgtccttttattttctataaaaaagtacgcttcactttttcccaaaatgaattgtcctttagtttgactgttttgattttcttattagacagtttgatttcgatcgttttcacatttctcgtgctgagtgcttcattgtccaagccgatgattgggtgttcgttgccgtcctgcaccacacgaagggtcagctttcggtcagagctgaggacaaatggcgagccgagtgtccggtaggtattattgttaagggatgcaagctctgatacctgcatgcatggaagcaatggatcaacaacagctcctgcaacagacttgttataggcggtgctccctgtaggcgttgagataatcattccgtcacctctaaacgtttcaaagtgcagatcgtcaatcagcacgtccatcacaaaggttttgatgatgcttgagcggatggatacctcgtttaagcagtgaaaaggactggcttgatccactgtcacttcaatcagcgggtattttctcacttcaatttgttcaaacgtcattgcatcgaccattttttctcgctcatcactatgaaagtcgcaatataaatgagctttcccctttttggtaatgccgacgtacaagcagtcgtcacgaaaattcgtctttctgactgcctgcaaaaatgtgccgtccccgccaatgctagcgataatattggcgtctgagtgctggttcacaacggtaaatccatgctcttccgctaattgtgttaacgagcgggcttgttcgttcgtttcctgatcctgtttgtgaaaaaaataaacattacggcgttgatcggtcatatcccatttcccctttgctgtcatatttaagtttttctgccatccagtatttgtgataaaatacctttggccataagtgtaccacgtttgccggcagcccgttaagccggagctttctcatgaagtgaaacatttttcatattgaatcgtataatgagagagtttaggaaaaaggaggagaaaaaatgaatgcaaaaagatggattgcattagtgattgctctggggattttcggcgtgtctattatcgtcagcatctctatgagtttctttgaaagcgtcaaaggcgctcaaacggatctcacatcactgacggatgaatcgcaggagaagacgctggaaaacggcagtccctcaagtaaaattgccgtattagaggtcagcggcaccattcaggataatggggactcaagcagtctgcttggtgcagacggatataaccacagaacgttcttaaaaaaccttgagcgcgcaaaagatgacaagacggtcaaaggtatcgttctgaaggtgaattctccgggtggcggagtgtatgaaagtgctgaaatacataagaaactggaagaaatcaagaaagaaacgaaaaaaccgatttacgtgtcaatgggttcgatggcagcatcaggaggctattacatctcaacagcggctgataagatttttgcgacaccggaaaccctgaccgggtcactcggcgtcattatggaaagcgtcaattattcaaagcttgccgacaagcttggcatttcttttgaaacgattaagagcggggcccataaggacattatgtctccttcccgtgagatgacgaaagaagaaaaaaacatcatgcaatcgatggttgataattcgtatgaaggctttgttgatgtcatttcaaaagggcgcggcatgccgaaagcagaggtaaagaaaattgcggacggccgcgtgtatgacggacggccgcgtgtatgacggacggcaggcgaaaaaactgaacctcgttgatgagcttggtttttatgacgataccattacggccatgaaaaaggatcacaaggatttgaaaaacgtctctgtcatttcttatgaggaaagcttcggattaggctcactgttttccatgggcgcgaacaaaatgtttaaaagtgaaattgattttttgaatatgagagaaattctatcgcaatccggttcgccgagaatgatgtatctctatgcgaagtaggagggaacaataatggacgcgacatatgaagagttagagcgcaatgacatcaaaggcccgcaagaagcggagctgctgacacatgcctatgctggcttttgggttcgtttctgggctttcctgcttgattggctcgtgatatggggattaaaccatttgctcgtttctcccctctttaccgtattggatctgccgaaaacatccggcatgtttaccttctcggcctacagtgtgacaacgcttattgtgtatcttgcctatttcgcactcatgacaaaatacttcaggcagacgcttggtaaaatggtgttcggcctcaaagtggtttctgtgaagcaagatagcaagctgacatggagtacagtgatttttcgtgaagtggttggacggtatattgataagatttggattttatatatcgttgttgccttttcacctacaaaacaagggattcatgattacatcgcggataccaccgtggtgcatgaaaaattataccgcaaataaccgataacccggacttccgtccgggtttatttttttaggaattggcgataatgctcctagaggaagtgaagaatatggtgtatgtactgacagccattcttattctcatagggatcgtactgcttctcagaatgaaaatccatgtcgcgctggagtatcttcatgccgatgataatgacaaattgaccttgaagattacggcgctgtttggccttataaggatcaaaaaaacaatcccggcgattaaggtgaacaaagaagacggaacagtggatatcaaacaaaaaactgaatccaaaatgaaaaaaagcagcggaaagaaaaaaattacacaaaacgatgtgcagcaaagcattaataaaatcgaaatgcttttgcatcaggtcaccagactgcggaaaatcagcgcgtcttttctcgcgcatttacatatcacaaaactagaatgggttacagtaatcggaattcaggacgcggcagtgacaggtgtgttaaccggtgctgtatggggcgtgaagggcggtatcgcagcaatgctctacgaccacctggactttgtgaataaacctgtctatgaggtgatcccgtcgtttcaagtccctgtttccaagacccattttcagtgtatattcttttttcgctttggacatgctatgcttgcagctttcaaattcgtcaaatacggacgggagctatccgtattaaagaagaatccgtcggctagaatgacttcaaagaatgattcatcagtttaaggaggaagcgtatatggcagaccatcccatccaaggtttaatgaaaaccgcaatggaaaacttgaaggaaatgattgatgttaacaccatcatcggagatccagtggaaacgcctgatggaagtgtgattttaactgtttctaaagttggattcggattcgccgcaggcggaagcgagtttggcggaaagccggccgaaaagaaatcggaagacgatgagacaagagaacagaaacttcctttcggaggcggaagcgggggcggtgtgtccattacgccgatcgcgtttttaattgtcggatcgacaggcatcagaatgcttcatttagatgaaaatacccatttaatagagaaaattttagacgcagcccctcaaacactcgagcgcatccagcaaatgttcaagaaaaataacaaaaaccaaagccaaggccaaaatcaaaaccaaatgaacaatatgaattattaaaaaaaggttaactgcgctggccgcagttaacttttttttggcataaactttgcagtttgcaggaaactttactatgatagagacatacatacaaaagggaggaattataatggctgaaattacattcaaaggcggtccggttacacttgtcggacaagaagtgaaggtaggagatcaagctcctgatttcacagtgctgactaacagccttgaagaaaaatcgttagctgacatgaaaggaaaggtaacgattatttctgttatcccttcaattgatacaggtgtttgtgatgcacaaacacgccgttttaacgaagaagctgcaaagcttggagatgtcaacgtctacacaatcagtgcagaccttccattcgcgcaagcgcgctggtgcggcgctaacggaattgacaaagtggaaacactgtctgaccacagagatatgtcatttggcgaagcgttcggtgtgtatattaaagaacttcgtctgcttgcgcgttccgtatttgtccttgatgagaacggaaaagtcgtttacgctgaatatgtaagcgaagcaacaaaccacccgaactatgaaaagccaattgaggctgctaaggcattagtaaagtaagcagggaaaaaagctccaggctgccgccggagcttttttcatggcaaggaggaacacaatatgcaaaaagaccatgtaggtgcggtgtatgagctgttaaacgaagccgcgattatgataaagaatgaattgcagatttcatatatagaggcgctggccgaagcaggagaaatgtattttcttgaaaaaacggatcagctgaaactgcctgctgatcagaaaaccaaacaacttcaggctctgcttgaaaaagcggaattcggcacgtatgagcatgagtgggtacgcaaggcttttcagcttgccgtccttaaaggaatgaaagatatctcgcatccaaacagacaaatgacgccggatacgatcgggcttttcatcagctatttggtgaataaatttatggcggacaaaaaggaactgaccattcttgatccagccctgggaactgggaaccttctgtttaccgtgctgaaccagctgtctgaaaaaacggcaaacagctttggcattgaaattgatgatgtgctcttgaagatcgcctatgcccaagcgaaccttctgaaaaaagagcttgagcttttccaccaggacagccttgagccgttgtttatcgatccagttgacacggtcatttgtgatctgccagtcggctattatccgaatgacgaaggagcagaagcgtttgagctcaaagctgacgaaggccattccttcgctcatcatctgtttattgaacagagcgtcaagcataccaaaccgggcggctacttattttttatgattccgaatcatttgtttgagagctcccaaagcggcaagctgaaacagtttttcaaagataaggttcatatcaacgcactgttgcagctgccaaaatctatttttaaagacgaagctcatgccaaaagcatccttgtgcttcagaaacaaggagagaatacgaaagcgccggggcaaattctgcttgcgaatcttccgtctttctccaatcaaaaggcgatgcttgatatgatggctcaatttgatgaatggtttaaaaaagaaaagtaagtgttttaaaagcagcttaggcagccgtatgaggtcgatgcctaagctgcttttatttatgcttttgaagaccggacttgacgaattgaatccagctttgaaacacaaaatacagagggaaaaaccgcaaattgtaagcgttcatcaatacaaaacctatagtgaatgtgtctgaaaataacgacttcttattgtaagcgttatcaatacgcaagttgacttgaaaagccgacatgacaatgtttaaatggaaaagtcagatatttttcggagaagatgttgatattcaccgggaaaaaagtacgaaaaacgaagttgttgatacagagtataaaggagcgtcaatcatgtccaaaattattgcaattaacgcaggaagctcgtctttgaaatttcagcttttcgaaatgccttcagaaaccgttttaacgaagggtttagttgaacgaatcggtatcgccgacagcgtattcacaatttctgtgaacggcgaaaaaaatacagaagtaactgatattccagatcatgcggtagctgttaaaatgctgctgaataagttaacggaattcggcattattaaagacttgaatgaaattgacggaattggccatcgtgtcgttcacggcggagaaaaattcagcgattctgttttattaacggatgaaaccattaaggaaatcgaagatatttctgaattggcaccgcttcacaatccggcaaatatcgttggaattaaagcgttcaaagaagtgcttccaaatgttcctgcggtagctgtatttgatacagcattccaccaaacaatgcctgagcagtcttacctttacagcttgccgtatgaatactatgaaaaattcggcatccgtaaatacggcttccacggcacttcacataaatatgtaactgagcgtgcggcagagcttctcggccgtccgttaaaagacttgcgcctgatttcctgccaccttggaaacggagcaagtattgccgctgttgaaggcggaaaatctattgacacatccatgggctttacgccgcttgccggtgtagcaatgggcacacgctctggaaacatcgaccctgccctgatcccatacatcatggagaaaacaggccaaacggctgacgaagtactgaatacattaaacaaaaaaagcggactgctcggcatttccggtttctcaagcgatcttcgtgacatcgttgaagctacgaaagaaggaaatgagcgcgcggaaacggctcttgaagtattcgcaagcagaatccacaaatacatcggttcttacgctgcaagaatgagcggtgtagatgcgatcatctttactgccggtatcggtgaaaacagtgtggaagtcagagaacgcgttcttcgcggtttagaattcatgggcgtatactgggaccctgcgcttaataacgtgcgcggcgaggaagctttcatcagctatccgcattctccagtaaaagtcatgatcatcccgactgatgaagaagtcatgattgcgcgcgacgttgttcgtttagcaaaataaatcgcatgaaagcacattctcttgaatgtgcttttttgttgatgcatgatagtgacagacagaaaacataaaagaggtgggccaatgagcgttcaagagcataaacaagaagctcccgatatcgttcggtgcaaagtgattactgtcagtgacacgaggacagatgaaaccgataaaagcggcaagctgatgatctcatttttagaagaagccggtcatcatattgccgcatatgaaattgtaaaagacgaaaaggatgctttgcaacggtcagtgcttgcgggctgcatggatgaacagacagacgcggtactcttaaacggagggacaggcatagcagatcgggatgtcacaattgaagccataacgccgctgttttcgaaagaactgcccggctttggagaaatattcaggatgctgagttatacagaggatatcggctctgccgcaatcatgtcgagagcaactgccggcgtcattcagcataccgctgttttctcaacgccaggctcaagcggcgcagtaaagctggcaatgaataagctgattattcccgaacttgcgcatgtggtcagagaaatcagaaaagacaagtaaatgaataaatactatgaaacttcacctgaaatttaggtgaagttttttttataaaaggcttgaaaaaacgaaacgtacttgttaaagtgtatacatacaaaatgtatttttattaaatataatttatttttatacaaaatagaaacacggttgagaggggatttttatcatgtcagaacagaaaaaagtcgtattagcatactcaggaggtcttgatacttccgtcgcaataaaatggcttcaggagcaaggatataatgtaatcgcctgctgcctggatgtcggtgagggcaaagatttggcatttgttcagcagaaagcgcttgaagtcggcgcgacaaactcctacgtgatcgatgcaaaagaagaatttgcacaggattacgcgcttatctctttgcaggcccacacaatgtatgaaggaaaatacccgcttgtttcggcattatctcgaccgctgatcgcgaaaaaactggttgaaattgcggaaaaagaagatgcacaggcgattgcccacggatgcacagggaaaggaaatgaccaggttcgtttcgaagtctccattaaatcattaaaccctgacctagaagtcatcgcgccggttcgcgaatggcagtggtcacgtgaagaagaaattgaatatgcggctagccgcggcattccgattccgatcaatcttgacagcccgtattctatcgaccaaaacctctggggacgcgccaatgagtgcggcattttagaagatccatgggcggcgccgccagaaggtgcatacgatttaacagctccgctggaaaaaacgccggacacgccggaagtgattgaaattgcatttgaacagggcgtgcctgtctccattgacggtgtttcctactcgctttctgagctgatcttgaagctgaatgaaatggcgggcgcgcacggtgtcggacgtatcgaccacgtggaaaaccgcctcgtcggcattaaatcccgggaagtatacgaatgccctggtgcgatgacactgatcaaagcgcataaagaattagaagatttgacactggtgaaagaggtagcccactttaaaccgatcatcgagcaaaaaatgtcagaaatcatttacaacggcttatggttctcaccgttaaaagacgcgctgcacgctttcttaaaagaaacgcaaaagcatgtcacaggcattgtccgcgtgaagctgtttaaaggccatgcaattgtagaaggacgtaaatcggaatactctctatatgatgaaaaacttgcaacatatacaaaagacgatgcatttgatcaccatgcagcaatcggatttatcgagctttggggacttccgacaaaagtgaacagcatcgtgaaaaagaaggagcagattaaagcatgaagaagctttggggaggccgatttcaaaaaacaccggaaaaatgggtcgacgagttcggcgcgtccatatcatttgaccaaaatttagttgctgaagacattacagggtctctcgcacatgctgccatgctgaaaaaatgcggtattctgacagcagaagaagagttgaaaatccgagagggcctgaatacccttttgcaaaaagcagaggagggagcattggaattctcagtcgattatgaggatattcatttgaacattgagaaaatgctcattgacgaaatcggtcctcttggcggcaagctgcataccggcagaagccggaatgaccaggtggcgactgacatgcatttatacttgaagaatcatgtcggccacatcatcgagctgattgaggcattccaaagtgcgctgattgaaaaggcggaagcgaacgttgaaacgattctgccgggctacacacatttgcagcgcgcccagccgatttcattcgctcaccatctgcttgcgtatttctggatgcttgagcgcgacaaggagcgttttcaggattcaatgaagcggattaacaaatctccgctcggctgcggggcgctcgcgggaacaaccttcccaattgaccgtgattattcagcggaactgctcggctttgatgccatttatgaaaacagcttggacggcgtcagcgacagagacttcattttggagtttttaagcaacagcagtatgctgatgatgcacctatcccgtttctctgaagaaatcattttatggtgctcgcaggagtttaaattcatcgagcttgacgatacgtacgcaacaggaagcagcatgatgccgcaaaagaaaaaccctgatatggcggagctgatccgcggcaaaacaggacgcgtatacggcgatatgatggggctgtttacgatcatgaaaggacttccgctcgcttacaacaaagatctgcaggaagacaaagagggcatgtttgacacggtgaaaacggtggagggcagcctgcaaatcttcacaggcatgatccaaacaatgactgtaaacaaagacgtcatgaagcaagcaacaaaacaagacttttcaaacgcgacggaactggccgattatttagctaaaaaaggaatgccgttcagagaagcgcatgaagtggtcgggaaacttgtgtacacatgcatcgaaagagggatctatttaagcgatatgccgtttggcgagtttcagcaggcgagcacactatttgaagaagatatttacactgtgttagacccttactacgcagttgaaaaaagaatgagcgccgggggcaccggattcaaacaggtggaacaggcgcttgaaaaagcgaaagcttgcgtggcagcaggagtttgttaaaatttccttcataaaatcccgtcattatagccaacctacctctataatgatgggaggcagaatgatgaaaaaagaaccggaacgctatatttatgatgaacaagaaagccaggagacaacaaggctcatttcagaagcatatcaaagcggttatgtcgatatgcctgatcaggagtcttcatctcctgcagaataagctgtctgtacaggcagctttttttgtatgccaaagtgtaaaaagtgatattgcaagccttttatagtaaagtagaagaagaaacactttattgaaagcggcgacgttgctttgggaggtattcatgtgcgacatgctttaattactgccggttcgaagggtttaggccgcaaagtgactgaaacgttgcttgcaaaggggtattcagtaacagtcaattacagacaggatgaggaggcagtcagccgcctgaaggaagcctgtcccgattgtcttgaccggctgcaatttgtaaaaggtgatgtcaccaaaaaagaagatctgctgcgtattgcagaggctgccttaaaccgcttcggaaggatcgactttttgattaacaacgctggaccatacatatttgaacgtaaaaagttagccgattatactgatgatgaatggtatggcatgctggaaggaaatttaagcgccgtctttcatttattcaaagcggttattcctattatgagaaaacagcaatttggacgcattattacgtacggattccaaggtgcggctcacgcgcccggctggcttcaccgatcggcatttggcgctgcgaaagtgggcttggcttctttgacgaagacaattgccattgaagaagccgaattcggcataaccgccaacatggtttgcccaggagacattgtcggcgacatgaaagaagcatcgatagaggaagccagaatgcgaatcggcaaagaaaaaacgccgataggaagatccggtacaggcgaggatattgccaggattatcgctttcttgtgtgaggagaactcagaccttgtgacagggactgtcattgaagccaccggaggcctcaatgtcattaacaagaatcaaacaacataagtttttcagctttttaaaaagggaaaataaaaaaaacaaaatcatgtgacgaggtgaaagaaatgaaagtgacatatcacggacattctgtaatcacagtggaaacgaaggaccatcatattatttttgatccgtttttaacagggaattcattaacggatataaagccggaggatgtaaaagcggatgtcatcttactaacgcacggccacaatgaccatgtcggtgatactgaacaaatcgccaagcaaaataacgcgctggttatagccccgaacgagctcgctgtgtacttaggctggaaaggcttgaatgttcatccaatgcatattggcggctcccgccagttcgattttggaaaagtgaagctcacacaggcctttcatggatcagccatcacagatgaagaaaacaaaacgatcacttacacaggcatgcctgccggtattttgctgactgtagaagataaaacgattttccacgcgggcgatacggcacttttctctgatatgaaactcattggcgaattgaatcatatcgaccttgctttccttccgattggcgataactttacaatggggcctgaagacgccaagcttgctgctgaatggctgcgcgcaaaacaggtcgtgccggtgcattacaatacattcccggtcatcgaacaagacccagaagcattcgctgacagcctgccgggcggagtcggcaaagtcatgtcggtcggtgagacgatcgagctttaaaccgtgaaaccatctcctgatgaatcaggaggtggtttttattttttcagttatcctgtaatggtcttatcagaggttccttccaattctttgctgcgctgctgaaaacgtttggttatccgggcgatcaagtccttcgtggcgcggtcaaaatgaacttctttttgatttgtcaacagccctatgggcggggtgatatccaggttcagaattggaatgactttagtgccgttgaacggtttagaatgtgcggtgctggtaaagattgaaattccgatgttttcacgtacgtaatattcatgtgacatgctgcttgtgagctccatttttttgtagcgattcccgagttctctatgtaaatgctgttcaatttgtaagcgaatggggcaattggcgggcgtaaatatgaagcgctcttctgctaaatcagacaaatggacagccttcttctcagcgagcggatgttgatcagatacaatcacatttaatgtgtcataaaaaaatggatggtagtaattttcaagaatcagctccggctcgccgcagactgcaaaatcaatcgtcccgtctaagagcttttgactgcaggtattggcgtcatcaaccttgatattaaccgttatctttgggtaatccattaagaaatcctttaaaatctcggggaatatcagactggcggttggctctgaaacccctatgttgataatgcctgcctcttcttcctttaagtcggagaggttgtgtttaagcgcctcgtattgcatcaaaagatctcctgttcgttcataaaaaagcttccctgcttttgtcaactgcaggctttttcctctttcaaacagcagtacgcctaaatcctgctccaattgcttcatacgcatcgatatcgtcggctgcgagtagttgagtatttctgcagctttatagaagcttccaaattttacaatcgtatgaaacgttttgattgagcgtaactccaatgtgctccctcctgtttttcatcattaaaattactgaagtgaaggtttactttttttgattagtcaaagatcagagtatgctttatagtataaacaataaaagcttagtaaacaaataggaattatatattttgtgaagaggagtgacaaaaatgagtgatgatatttttcgactggcaactgttgaagatgcatcggagctgttgaaactggttaacagcgcatttcagcccattcggcagctggatattgattggccatccacgagagctgatatccaaatggtatcagaaaatattgaacatcattcagcgattgtgctggagcgggatgggaagctgatttcaacgattacaatcaggttcccgtgggagagtgagacgcctccttcaaaatatccatttgtgtggtggtttgcgacactgccggaatataaagggcaaggcgccggaagtaagctgcttacgtatgttgaagaaaaagtgcttcgagatatgctgaaggctcctgcgctgacactcggcacatcggcgcgcaagcatccttggcttgctgacatgtacagaaggagagggtatgaagtgtattttgagcaggaaaaagacggggacataggtgtgatgatgcacaaggttctgattccggaacgatttaacccaacgcttttaggtgcgcccagctgggcatgatgtgaggcagcctatgaataagcgtaaaggattggttttgctgctgtcagtgtttgcattacttggcgggggatgttcgcaaacaaataacaaaacagatcgtcaggctcaaacggtcatagtcggcactggaacagattttccgaatattgcgtttttaaatgaaaaaggtgaattgaccgggtatgacattgaagtgatgaaagccatcgataaggagttgcctcaatatacatttgaatttaaaacgatggatttctcaaatttgctgacgagtctcggaaataaaaaaattgatgtgattgcgcacaatatggccaaaaataaagaacgagaaaagcgttttttgtatcataaagtcccatataactactcgccgatgtacatcacggtgaaagaggataatcacaagattcatacattaaaagacttacacggaaaaacagtcatagttggcgccacgtcaaatgcggcagattatattacaaagtacaacaaaacgcacggcagcccaattcatttgaaatatgcgggacagggaagcaatgataccgccaatcaaattgaaaccgggcgcgcagatgcaacgatagctacaccgtttgccgtcgattttcagaataaaacgcacgccttccgccaaaagacagtcggtgacgtgttattagataccgaggtgtactttatgtttaataaaggcagccaaaccttggcggatgacacggatcaagcgattaaaaagctggagaaaaacggaacgctaaaaaaactaagccgaaaatggctcggggcagattattcaaaatcaagttttgaaaaataaatggggcgatgagatgaaaacgaaaacagcattcatggcaatattattttcgcttataacagttctgtcagcttgcggtgcaggcagtcaaacgacgggagccgggcaaaagaaggtacagacgatcacggtcggaactggaacccaatttccgaatatttgctttatcgatgaaaaaggcgatttaaccggttatgatgtcgaactgatcaaagagcttgataagcgcctgccacattataaattcacatttaaaacgatggaattttccaacctgcttgtcagcctcggacagcataaagtcgatatcgtggcacatcaaatggagaaaagcaaagagcgtgagaaaaaatttctgtttaacaaggttgcttacaaccattttcctttaaaaattactgtgcttcaaaataacgatacgatccgtggaattgaagacttaaaaggaaaacgggtgattacgagtgcaacctccaacggagcgcttgtactgaaaaaatggaatgaggataatggacggccgtttgagattgcctatgagggccaaggcgcaaatgagactgcgaatcagctgaaatcggggcgtgcggacgcaacgatctcaacgccttttgcagtagactttcaaaacaagacgagcactattaaagaaaaaaccgtcggtaatgtgctttcaaatgccaaagtgtattttatgtttaacaaaaatgaacaaacgttaagtgacgatattgataaagccttacaggaaatcattgatgacggaacgttgaaaaggctcagtttgaaatggcttggtgacgactattccaaagagcagtattaggtaaaaagagagggagcagtgatggaaaaagcgtttgatatgaacatgattggagattttgtgccgacgttaaccgcttatttaccggttacattatacattttaacactgtccttgcttttcggttttgtattaggactctttctggcactgccccgcatctataatattccaattgtaaatcaattggcaaaagtgtatatctcgtttttcaggggaacgcctatcatggtgcagcttttcatcgtgttttacgggatcccggcgcttacggggcttatcgggattgatacatcaaaaatggacccgttttatgctgctgtcgcaacctacgcgttaagcaatgcagcggcagccgcagaaatcattcgagcgggggtgggcagtgtagataaaggccaaacggaagcggcgtacagtattggcttaagcggtagtcaggccttcaggcgaatcgttctgccccaggcacttgtccaggcgtttccgaatatgggaaacatggtgatcagttctttaaaagatacgtctctagccttttcaataggtgttatggatatgtccggaaggggccaaacactgattacctcaagcaaccattctcttgaagtttacattgcgctatcgattgtttattatgctgtagcggttttattcgaatggttctttcgagtggcagaaaaacgaatcaagaagaatcaaacaaggattgttactgtttttgacatgaacatacattgatatatttcttcggatgaggggggagaagattgcaatttgactttccatttatcgtttccgccatgaaagaaatggtaaagaccattcctctgacattgatgatggctgttttgccgattgtgtttggatttctcgtggctcttggaaatataattgttagaatttttagaattaagggcttggtggcttgctcaaggttttatgtgtctttctttcgaagtacacctgcaattcttcacattatgttgatttatttagggataccgcctgttgcagatcaagtcagcagtttttttcatctcggctggtccgctaatgagataccggtctccatgtttgtcatcatggccttgtctttaactgccggagcttatctcacagaaatcatccggtcgggcattctggcgatggataccggacaggtcgaagcggcttattcaatcggcttgacatacagccaaacctttcggcgtgtaatattgccgcaggcgctgatggtttccatcccaaacttcacaaatttgggtatcggctttttgcataccacctctatcgcggctatagtggctgtcccagagattacagggacggcgactatcgttgcttctgataattatgcatttttagaagcgtttatcggagcagcgattatctattgggtgctgactctaatcctagaatccgcaaatggagtattagagagaaaggcagccagatttcaaggaggcactttatgattgagattaaaaatatccataaacagtttggcatccaccatgtattaaaagggataaatctcacggtacgcaagggagaagttgtgacgattatcgggccgagcggatcagggaaaaccacctttttacggtgcctgaatttattagaacgtccagacgaagggatcatttctatacatgacaaagtgattaattgccgctttccgtccaaaaaagaggttcactggctcagaaaacagacggcaatggtatttcagcaataccacctgtttgctcacaaaacggtgattgaaaatgtcatggagggcttgacgattgcccggaaaatgagaaaacaagacgcgtatgccgtagcggaaaatgaactgagaaaggtcgggcttcaagataaattgaacgcttatccgagtcagttatcgggaggacaaaagcagagggtagggatagcaagggcgcttgccattcatcctgatgtgctgctgttcgatgagccgacggcagcgcttgacccggagctggtcggtgaagtgcttgaggtaatgctggaaatcgtgaaaaccggagccaccatgattgttgttacacatgaaatggagtttgcaagaagggtctctgatcaagttgtttttatggatgaaggagtcattgttgaacaaggaaccccggaggaagtcttccgccataccaaaaaagacagaacgaggcagtttctccgccgtgtttcgccggaatatttatttgaaccaaaagaacacataaaggagccggtgatatgatccgcttaagtattttagaccaaagcttgattggtgaaggggagacagcagctgatacattacagcatacagtgaaattggcacaaatggctgaagaatgtggatatcaccgattttgggtggccgaacatcacaacaatgatgagattgcagggtctgcacccgaggttcttttaggctatcttgctgcaagcacaagaaaaattcgtttagcatcaggcggagtgatgctgcagcattacagctcttataaagtagcggagcaattccatcttctatcagcgttagctcccggccgtatagatcttggagtgggcaaagcgcccggcgggtttcagctgtccacagacgcgctgcaggccgaatataaaaaaccggtgcgtcagtttgatgaaaaactggaggagcttactcatttcgttcgggatgattttcctgatacccaccgctatgccgcattgcgtcctaggccgcaggttgatcggaagccgggtatttttctattgggaggaagcacagagagtgccatttctgctgcaaaactgggaatctcttttgtctttgcttactttattaacggtgaagaggaagtgctgaaggaagcccgccgagcatttgacgcgcatctcccgccaggatctgaggctgaatttcatcttgcccccgctgtttttgcggcacatacaaaagaagaagcggaaaaacatattgtgtcgcgtgaatcgataaaagtggttttgaaagacgggcgtaaggtcaacgtcggttcccgcgaacaggctgaggcctatctggaaaacgtcacagagccctatgacatcatcgtgcaaaaaaccgggattattgccggaacaaaggaagaagtggcagaagaattaacacgtttatcaggcacatacaaaatcaatgattttgttatttttacaccgatcaaaaatgctgtagaaaaacagctgtcttatcagctgctgagcgatgcagttttagctgcaaaacgttaaggagggacagaagaatgagtgatgttgtgaacattgtggtttggagtaaaaaaggctgttcgtattgtgaggaagtcaagaattatttgaatgaaaaagggttcccgttccaaaatatcgatgtttcagagaaagaaaagcttcgggatattttacaggtgaaatatggggtgcgccatgtgcctgtggtcgaaatcgggcgcggcaatcagtatcaagggataactgaaatcggcattgaacaccttgatcttgcacttgctaatcatgcacagataaaggaggcaaaaagatgacacgtgcagattttattcagtttggagccatgattcacggtgtcgggggaacaactgacggctggcgtcatcccgatgttgatccctcggccagcacgaatattgaattttacatgaaaaaggcgcaaacagctgaaaaaggtttgtttagttttattttcattgcagacggcttatttatttctgaaaaatcgattcctcattttttaaaccgttttgaaccgatcaccattttatctgcgctggcatcggttaccaaaaatattggtttagtagggacgttctctacatcttttactgagccattcactatctccagacaattgatgtcgctggaccatatcagcgggggcagggccggctggaatctggttacttcgccgcaggaaggagcggcgcgcaaccatagtaagtctaatttgccagaacacactgaacgttacgagatcgcacaagagcatttggatgttgtgcgcgggctgtggaattcctgggagcatgacgcatttatacacaataagaaaacagggcagtttttcgatcaggcgaagcttcatcgcctgaatcataaaggaaagtattttcaagtagaggggcccttgaatatcgggcgctctaagcagggagagcctgtagtgtttcaagcgggttcatcagaaacaggccggcagtttgctgctaaaaatgcggatgcgatttttacccattccaattcattagaagagacaaaagcgttttatgcggatgtgaaaagccgagctgctgatgaagggcgtgatccttcaagtgtgcggatttttccagggatcagcccgattgtggcagatacggaagaagaggcggaaaagaagtatcgtgaatttgcagaattgataccgattgaaaatgctgttacttatttggcccgtttttttgatgattatgatctgagtgtttacccgttggatgagccatttcccgatattggcgatgtgggaaagaatgcgtttcaaagcacaacagaccggattaagagagaagcaaaagccagaaatctgacattgcgggaggtagcacaggaaatggcttttccacggactctattcatcggaacaccagagcgtgtcgcatccttaattgaaacttggttcaacgctgaggcggcggatgggtttatcgttgggtcggatataccgggaacacttgatgcttttgtagaaaaggtgattccgattcttcaagaaagagggctttatcgtcaagattatcgcggcgggacattgcgggaaaatctcggtcttggcattccgcagcatcaatccgttttacattcatcacatcattaggtttcgtctgatcgaatgcggaagctgagagaggaggctgacttttttgacgatcattgccggtacggttgtgaaaggaaaacaattaggcagaaagcttggattccccacggcaaatgtagatgcaaaaatacatgggctgcgtaatggagtttatggggttctggcgacagtcaatcatcaatttcatttaggggttatgaatatcggtgtgaaaccgacggtgggctctaaccttgaaaagacattggagatttttttgtttgactttcatagagacatttatggagaaaaaatcgaatgcagcattctctttaaaattagagaagaaagaaggtttgattctttggagtctttaacaaagcaaattaaaaaggatatttcgtgcgttgcaaaacgctttgagctgattgggattatggcaccaaacaaaaaagaaagccttctttcccatcaggagttaaatcttccggatctctgcttttacaagaaatgtaataacctatatggcgtcaaccgaggcgtatacaatgtcattgataactggttttttgagtacggaattacacaagtagcttacaggcgcatttatattttatcttttttaagctttttgaaagaagataatccgaaagtttccagcaagtatataagatttggggcgggcggtcttgctgataaattgaaccgatttatttcatcttatgttgaagagtctgaagaaaatatattgggatagggaaaggagcggaacatatgtctttggattattggagaaatatagaaggctcctatccatatcagactacaggaaatgacatcctgacgttgaaagaggagtctaatcccgtaaatctctcaacgctagaaaagcagctcatcggcattcgccggcacctgcaccaatatcctgaactgtcaaaagaagaatttgaaacaactgcttttataaaaaaatgccttaaagaaaaggggatacagattcgccctactgctctaaaaacgggtgtgttcgcagacatagcaggggagtcagaaggtccggcgattgctttgagggctgatattgacgccttgccaattgaagaaaaaacaggattgccttatgcgtctaaacataaagggatcatgcatgcgtgcggtcatgattttcatacggcagcgcttcttggtgcggcctttttattgaaggaaaatcaagacagtctgaaaggaaagattcgtttattatttcagccagcagaggaagcgggtgcaggcgctacaaaagtgatagaggacggccaactggatggcattgatgcggttattggccttcacaataaaccggatatcgcggttgggactgtagggttaaaaacaggcccgcttatggctgctgttgaccgatttaaagtagagatagaagggaaaggtgctcatgcagcattgccgcataatggttttgatccaattatcggcgcctctcagcttattgtcgccctgcaaacgattgtaagcagaaatgtaaacccgctgcaaagcgcgattttaaccgtagggaaaatcaacggcggcagcacttggaatgtcattccggatacagtggtcattgagggcactgttcgtacatttgattcagaggttcgtaatcaagtgaaacagcgtttttttgcagtcacagagcagatttctgccgctttctcgttaaaggcaaatgtgaagtggcattccggaccgccgccgctttgtaatgatgaggcaattacggggctggtgcgagacgctgcacataaagcgaaacttcaagtcattgatcccgccccatcaaccgcgggggaagattttgcttattatcttgagcatattccgggatcctttgcgttttttggaacagacggtgatcatgattggcaccaccctgcatttacaatagatgaaactgcaattatcaaagcctcttattttttatatgaaagcgccaagagattgttagattcgaatgaagagtcaaaaatatctgattgatatagatggggtgttctgatgaagaaattaatcgtttttgcatttattggtttattgtcgcagttaatagacggttcgttaggtatggcttatggggttacctcaacttctttgttattggcgtttggcatcacacctgctgtggcttcggcttctgtccatttagcggaagtcgtaacgactgccgcatcgggagtgtcgcatattaaatttggcaatgttgacaaacaaaccgtttatcagcttgtcattcccggctctataggcgcttttttaggcgcggcattcctcagccaattacctggagatgtggcgaaaccctatatttctttgtttttgctccttctgggcggatatgtattgatcaggtttttatttcaatataagccggctcttgagaagaagcatgtgccgttaaaccgaaaacaatccatcccattgggagtgatcgctggttttgcagatgccacaggcggaggcggctggggaccggtgaccactccgattttattatcccgcaaaggcttgagcccgaggaaagttgtcgggactgtagacacaagtgaatttgccatcgccgtatctgcaaccgccggttttcttatttcattaggatgggaggacgtcaattggttatgggtgttttcactaatggccggcggaattatcgctgcccctatcgcagcatggctggtgcagaagtttcatccgcaattgatgggtgtgcttgtaggaggatttattattctggtaaatgccagaacattaataaatgaatggatcgcaaacacagctgttcatccattgatctatacggccataggggcgatatggctatccgcagttttatttgttttatctaaaatagggaatcgaaatattgttaagacagcggttgatgtccatttaaaagaaaaataaaggtttttccgctttacgatgtaaaaggaatcacgtggtccttgcgtttgactggaacgaaatcaacgctgtaagaagccggtcgggcttcttttttattttccagcctcattgcgtataaatcctttgaaaccttataataaaaacaagaagactgtccttagaggtgaaaggcttggcaacgaagcatgaacaaattttaacgtatatcgattcactgcctgtcggtgaaaaaatttctgtccgaagaattgcaaaggaaatgaaagtaagcgaaggaaccgcgtacagagcgatcaaggaagcagagaataaagggtttgtcagcacgattgaacgtgtgggcacaatcagaattgaacaaaagaaaaaagagaacattgaaaagcttacctatgcagaggttgtaaatgttatagacggacaagtgctcggaggcagggcagggctccataagacattgaataaattcgtcatcggcgcgatggagcttgacgcgatgatgcgttacaccgcagcggggaatcttttgattgtcggaaacagaatcaatgcacacaggcaggcgcttgaagcgggcgcggccgtattggtgaccgggggctttaacacggatgacagcattgtgcagctggcagatgagcttgaactgccgattttatccacgagctatgacacctttacagttgccgcgatgattaaccgggcaatatatgaccagctgatcaaaaaagaaattgttttggtggaggacatcctaacacctgctgaccgcacggtatatctttcgcctaaggataaacttgaaaaatggtatgagaaaaattttgaaacggggcacggccgcttcccggttgtcgacgatcaaatgaaaatccatggcattctgacatcaaaagatattgctggccatgaccgaaatgcatctatagaaaaagtcatgaccaaaaatcccgtcacggttattgggaaaacatctgtcgcttcagctgcgcaaatgatggtatgggaagggatcgaagtgcttcccgtcactgacggccaccaaaaactcatcggcatgatcagccgccaagacgtattgaaagctcttcaaatgattcaaaagcagccgcaggtcggggagaagcttgatgatatcgtttcaagggggtttaaagatgagggtgatgataaagaagatcaaacggtttacgagtatgaagtcacgccgcaaatgacaaatcagcttggaaccatttcttatggcgtatttacgaccattttgacgcaagcggcaaaccgatttttgcgctcgaaaaaacgcggcgaactcgtcatagagagcatcaccatcttctttttgaagcctgtgcagatggaatcagtcatcgaagtcaaacctcgcatcttggaggccggcagaaagtttgggaaaatggaagtggaagtgcacagccaaggtcatatcgtgtctaaagcgatgctgatggttcagctgatggaaagaagctaagggacgttcaggcgccccttacgcgtgatctctttcagcttctttggcgtgaaggggattgtaatgcctgaaggctttataacctgcccaagcgcttcctgctcctatgacgataaagataccgccgattactaacgttaatactgaatggaataatatcatttggttaagcccgtagaacaggactagtgaccctaaggccatgcttgattttgctgaacatatttcttttgccaaagatggctttgcccgtacgccttttactttatagtacacataaaagcaggctgaaagcccaatcaaaaaaacaagaaccagcataaatgaaatcctccatcgtaaaagtttacaaccccattttatacaaaaacgggcttggttttgacgttatttttcttttccgtcggcagagaatgtgatttaatgaataaaaacaataaaggagtatcaaatgaaaacagaattgatcagaaccatatcattatatgacacgattatcttacatagacatgtgcgtcctgatccggatgcctacggatcacagtgtgggcttacggaaatcctgcgtgaaacatatcctgaaaaaaatatttttgcggtcggcacgcctgaaccgtccctctctttcttatattcccttgatgaggtggacaatgaaacatatgaaggcgcacttgtcattgtctgcgatacggcaaatcaggaaagaatcgacgatcagcgttatccttcaggcgccaaactaatgaaaatcgaccaccatccgaacgaagatccatacggtgaccttctctgggtcgatacaagcgccagctcagtaagtgaaatgatttacgagctgtatttagaaggaaaagagcacggctggaagctgaatacgaaagcggcagagctgatctacgccggcattgttggagataccggacgctttttatttccgaataccacggaaaaaacactaaaatatgcaggcgagctcattcagtatccattctcttcctcagagttatttaatcaattgtatgaaacaaaactgaatgtggtgaagcttaacggctttatctttcaaaatgtgtctttgtccgaaaacggggcggcttctgttttcatcaaaaaggatacgcttgaaaaattcggcacaacggcttctgaagcgtcgcagcttgtcgggacgcttggcaatatctcaggtattcgcgcctgggtgtttttcgtagaagaagacgatcaaatcagagtcagattccgttcgaaggggcctgtcattaacggacttgcccggaaatataacggcggagggcatccgttagcttcaggcgcctctatttacagctgggatgaagctgatcgtattttagctgatctggaaacattatgtaaagaacacgagtagaggggagaccctctctcttagtgttcatctgtgacggggatgaaccagcagccgaaatcagtaaggtcctcgtagacttggagattgtgtgattgaagttcttttttgatgagggaagcgagtgagtttgtttcggcatatgcagaaaaaccttgtctgagacgggctgcttgatcttttgctaactgacggtcactgtaaacctccatttcccttcctccttcctttcgccattaagcctcacatatagtttataaaaaagaatgggaaaaagcgacagaagtttggagaatttaaaaaaaatccataattatgtggcgaaagaaatttcaagttccactgtcagcctcgtataaataatcaattctctgacggttgcctcgtattttttttcattgatcatatagactttattttcaattgtccgcttcaagagatcctttgtttgatagacgctctctatgtcttttgtaatcacctctgaaatatcatcctttacatgctcctcgaatttcgttttatccggctgtgatattttatatttatccccattcagcaatttgacgctgacgctttgaatcagcagttttcttttattatcttcattcagtttatggaggtcttcctgatagatcgaaatttgattgttcaagtctttaacatgctctttttgcttttcgatgaggctgacttgctcctcttggaatgttccgtaagtaaacaggaaaaagaaccagctaattgcggctccgcacatcattcccgcgaaaaaacgctgccatcccggttttttgtaatgctgggggaccctcatgaagaaagatgctcctgggtcagccatgatataataagccagccgctttgcgcgcctcccatggccgaaataattaaaagaagctgtttaaaaatatctctcgtattgccttcgagtatgccgcgttcaaagctgtataccgcatcaaaggtgcctccgatagctgcgacaagcgcccatatttttaaccggttggcaagctttgtaatggctgtaagcgggggttcgcctgccaagtatgctccgagccccccaatgagtgcgcccccgatcagcacccctaacgcaatgaagtagctattgataaaattcaccataaatcctgcttcctgatccatctttatcacctcaccttttatatcatattgagctttcaggacaagtatgatgatgagtcaaaaaagaacatttgtttcttttggaaaccggccttataatgaaggaagaaatggatcgtaatgagaaagaggtgatagcatgtcttttgttcacctgcaagtgcatagcgggtatagcctgctaaacagcgccgcggctgtggaagagctcgtcagtgaagctgacaggctcggatatgcgtctttggcgctgacagatgatcatgtcatgtacggagctattcaattttataaagcttgcaaggcgagagggatcaacccaataatcggtttgacggcttctgtttttacagatgacagcgagcttgaagcatacccgctcgtcctgctggcaaaatcaaatacaggctatcaaaacctgctgaaaatcagcagcgttctgcaatctaaatcaaaaggcggactgaagccgaaatggcttcacagttatcgagaagggattatcgcaataacgcccggcgaaaaaggatatattgaaacgcttcttgaaggagggctgttcgaacaggctgctcaagcctcgctggaatttcagtctatattcggaaagggagctttttatttctcctatcagccttttaaagggaatcaagtcttgtctgagcagattctaaagctatcagaagaaacgggtatccctgttacggccacaggcgatgtgcattacataaggaaggaagataaggctgcctaccgttgtttgaaagcgattaaagcgggggaaaaactgacggatgcacccgctgaagatttgcctgatctcgatttgaaaccactcgaagaaatgcaaaacatttatcgagagcatcccagggcactgcaagcttctgtagagatcgcggaacaatgccgggttgacgtcagtctcgggcagacccgtctaccgtcttttccgaccccagacggaacgtccgctgatgattatttaacggatatctgtatggagggactccgcagccgtttcggcaagcctagtgaacgataccttcgccgtcttcaatatgagcttgatgtcatcaagcggatgaagttcagcgattactttctgatcgtgtgggattttatgaagcacgcccatgaaaaagggattgttacaggaccgggaagaggttctgcggcgggttctcttgtggcatatgtgctgtatatcacagatgttgacccgattaagcatcaccttctgtttgaaagatttttaaatcccgaacgcgtcagcatgccggatattgatattgactttcccgatactagaagggatgaagtcattcaatatgttcagcagaaatacggtgcaatgcacgtcgcacagattatcacctttggaacacttgcggcaaaggcggcgctccgggacgtcggcagagtattcggcgtcagcccgaaggaggcagatcagcttgcaaaactcattccttcaagaccgggaatgacgctggatgaagcgagacagcagtcaccgcagctggataagcggcttcgggagtcaagcctgcttcagcaagtctattcaattgcccggaaaatagaagggctgccaaggcatgcatcaacccacgcagcgggcgttgtcctgagtgaagaaccgttaacagatgttgttccgcttcaagaagggcatgaagggatctatttaacgcaatacgcgatggaccatcttgaagacttgggccttttaaaaatggatttcttaggtttgaggaatctgacacttattgaatccatcactttaatgattgaaaaagaagaaaatattaaaatagatctttcaagtatttcctacagcgatgacaaaacgttctccttgctgtcaaaaggggatacgacaggcattttccagcttgaatctgcagggatgagaagcgtcttgaaacggctgaaaccttcgggcctagaagatattgtggcagtcaatgcactgtaccggccgggtccgatggaaaatattccgttatttatcgaccgtaaacacggccgggcgcctgttcattatcctcatgaagatttaaggagcattttggaagatacatatggcgtcattgtgtatcaggaacaaattatgatgattgcttcccgtatggcggggttttctttaggcgaagcggacctattgagaagggcggtcagcaaaaagaaaaaagaaatcctggacagagagcgaagccattttgttgaagggtgcttaaaaaaggagtattctgtagacactgcaaatgaggtctacgatttaatcgtcaaattcgcaaactatggctttaacagaagccatgcggtggcatacagcatgatcgggtgccagcttgcgtatttgaaagctcattatccgttatattttatgtgcggattgctgacaagcgtcattggcaatgaggataaaatctctcaatatctttacgaagcaaaggggagcgggattcgtatccttcctccgtcagtgaataaaagcagttttccgtttaccgttgaaaacggatctgtcagatacagcctccgcgcgataaaaagtgtaggcgtctcagcagtcaaagatatatataaagcaagaaaagagaaaccatttgaagatcttttcgatttctgctttcgcgtgccgtcaaaaagcgtaaatcgcaaaatgcttgaagcacttatcttttctggtgcgatggacgaattcggccaaaaccgggccacgctgctcgcatccattgatgttgctttggaacatgctgagctattcgccgcggacgatgaccaaatgggattgtttttagatgaatcgttttcaattaagccgaagtatgtggaaacggaagagcttccgctagtggatttacttgcatttgaaaaggaaacgctcggcatttatttttcaaatcatcccctctccgccttccgaaaacagctcactgcgcaaggagcagtctccattctacaggctcagcgggcagtcaaaaggcagctttcactaggcgttctgctgtcgaagatcaaaacgattcggacgaaaacaggtcaaaacatggcgtttttaacgctcagtgatgaaaccggcgagatagaagccgtagtcttccctgaacaattcagacagctttctcccgttttaagagaaggcgctcttttgttcacagcggggaaatgcgaagtaagacaagataagatccaattcatcatgtcccgggcagaattattagaaaatatggatgcagaaaaagcgccatcggtttatataaaaatagaaagcagtcagcacagccaggagatcctggcaaagattaagcgcattttgctggagcataaaggggaaacaggcgtttatctctattatgaaaggcaaaaacagacgattaagctacctgagtcgttccatatcaatgcagatcaccaggtgttatatcgcttaaaagagctgttgggtcaaaaaaacgtcgttttaaaacagtggtaacgattcgctttttgttatacaattggagcaattatgtgatcctgtttaaatattcagatagatttactccgcagaatgcagcaatcaacgcagcagtatacgaatcaaaaaatatccataaggagtgtttaggagaatgtcattaagagaagaagcattacacctgcataaagtcaaccaggggaaactggagtctaaatcaaaagtagaggtcagaaatgcgaaagatttaagcctcgcgtattctccgggtgttgcagaaccgtgtaaggatattcatgaagacattaacaaagtatatgattatacaatgaaggggaacatggtagcagttgtaactgacggtacagctgtgcttggccttggaaacatcggccctgaagcggcgcttcctgttatggaagggaaagcagttcttttcaaaagctttgcgggcgtagatgcgttcccgattgctttaaacacaaacgatgttgataaaatcgttgaaactgtaaaattgctggaaccgacatttggcggcgtcaaccttgaagatattgcagcgccaaactgctttatcattgaagagcgcctcaaaaaagaaacaaacatcccggttttccatgatgatcagcacggtactgccattgtaaccgtagcaggtcttgtgaacgcgctgaaactgtctggaaaatccatgtcatccattaaagttgtcgcaaacggcgcgggtgcggctggcattgcgattatcaagcttcttcatcattatggcgttcgcgacattgtgatgtgcgattccaaaggggccatttatgaagggcgcccgaacggcatgaacgatgtcaaaaatgaagtggcgaagttcacgaaccaagatcgcaaagacggttctctgaaagatgttatcgttgatgctgacgtatttatcggtgtctctgtagcaggcgcgttaacaaaagaaatggttcaaagcatggcaaaagatccgattatctttgcaatggcaaatccaaatccggaaatcatgccggaagatgcgcgtgaagccggagcaagcgttgtcggaactggccgttctgacttcccgaaccaagtaaacaatgttcttgcattccctggtattttccgcggagcgcttgatgtgcgtgccactcatattaacgaggaaatgaaaatcgcagcggttgaagccattgcttcactggtttcagaagatgagcttagcgcagactatgtcatccctgcaccgtttgataaacgtgttgcgcctgctgttgcgaaggctgtggcaaaagctgcgatggaaacaggtgttgcaagaatcactgttgaccctgaggaagtcgcagaaaaaacaagaaaacttacgattattggtgaataattttaattcattccaaaaatggcagcgcgttggcggagaccggcgcgctgttctcaagttaaactgacggctgaaatttttttagggggttagccttaaaaaaatttcagccgggtttaacattatttttgaatgcgctgtcaaccttgtcgtttcaacaccttatctgatttcatacaagccgctccgagcacgtcatcgaataaaaagttgtcgaattgaggatgacagcgtttgacaaaaaaagtacaatagtttcggtaaagttattagcaagtctatctgtttgatgacatgcggtgaagaggacccttcacaaaagggaggtaatcatttgttaaaggatatattcacgaaaaagaaaaagtatgcttccgtaccatctgatcaagcgaagcacgatgttccggaaggcattatgacaaaatgtcctaagtgtaaaaaaatcatgctcactaaagagttggataaaaatatgcgggtatgcatgaactgcgattatcatttcccaatgaacgcaaaacagcgtatcgaaagcttgatggatgaaaaatcttttgaggaattcaatcagggaatgctctcggaaaatccgcttggtttcccgggatatctggaaaagcttgaaaaagatcgcgagaaaacatccttaaacgaggctgttgtgacaggcaagggcaccatcggcggacacccggctgtagtcgccgtcatggactcttcattcagaatgggcagcatgggttcagtcgtcggtgaaaaaatcacgcttgcgattgaaaaagcaaaagctgataaagttccgtttattatttttacggcttcaggcggcgctagaatgcaggaaggcgtattaagtttgatgcagatggctaagacaagctctgcgttaaaactgttcagtgaagaacagggtcttattatttcagtaatgacgcatccgactaccgggggcgtatcagcaagctttgcatcccttggcgattacaatttcgctgagcctggcgcgctgatcggttttgccggaagacggattattgaacagacaataggagaaaaactgcctgaggacttccaaacggctgaatttttattaaaacatggacagcttgatgcggttattcatcgtgacgatatgaaaaaaacgttagaaaatctgctggatatgcatcaaacaggaggtgacattgagtggctctaagattagaatttgaaaaaccggtgattgaactgcaaaccaaaatcgccgaactaaaaaaattcacccaagattccgatatggatctaagtgcggaaatcgaacggctcgaagaccgtctcgctaagcttcaggatgatatttacaaaaatttgaagccgtgggaccgggttcaaatcgcacgtctggcggaccgtccgacaactcttgattatatcgaacacctgtttaccgacttttttgagtgtcacggagacagagcgtacggggacgatgaagccattgtcggcgggattgcgaagttccacggcctccctgtaacggtaatcgggcatcagcgcggcaaagacacgaaggaaaacctagtccgcaattttgggatgccgcatcctgaaggctacagaaaagcgcttcgtctgatgaaacaggctgacaaatttaacagaccaattatctgttttattgatacgaagggggcataccctggacgagcagctgaagaaagaggacaaagtgaagctattgccaaaaacctgtttgagatggccggccttcgagtgcctgttatctgcatcgtcatcggtgaaggcggaagcggcggagcccttggtctgggtgtagggaatcacttgcatatgttggaaaactctacttattcagttatttctccggaaggtgccgcggcacttttatggaaggactccagtcttgctaaaaaagcagcagaaacaatgaaaatcactgcgccggatttaaaagaattaggtattatagatcatatgattaaagaagtaaaaggcggagcgcaccatgatgtgaagctgcaggcaagctatatggacgaaacccttaaacaatcgttaaaaactttgctgaagctgagcgaagaagaattagttcagcagcgctatgaaaaatataaagcaattggcaaagtctcggttgaagatcaatatatcggggtaaactaaataaacgtgaagcctttggctcacgtttattttttgtgacattccttaaattttatttaaaaacaatttatttaattgtataataggtaaggtttcatagggaggatggagatcccttttcattgtttttagggcaatgatcatgttatgtttaatcatatatgttgctgaggtgaatggagaatgaaacgtataggggtattaacgagcggcggggattccccgggaatgaacgcagcagttcgcgcagtagtcagaaaagcgatctatcatgacgttgaagtttacggtatttacaacggatacgcgggattgatcagcggaaagattgaaaagcttgaacttggatcagtaggcgatattatacatcgtggaggaactaagctttatacggcaagatgtcctgaattcaaaacagttgaaggccgtgaaaaagggatagcaaacttgaagaagcttggtattgaaggccttgttgttatcggcggagacggttcatatatgggtgcgaaaaaattaacggaacacgggtttccatgtgtcggtgtaccgggtacaattgataatgacattccgggcactgattttacaatcggtttcgatacagctttaaatacagtaattgacgcaattgataagattcgcgatacagcgacttctcatgaacgtacatatgtaatcgaagtaatgggccgtcatgccggcgatatcgcattgtgggccggtcttgcagggggcgcggaatcgatcttaatccctgaggcagactatgacatgcacgaaatcattgcccgcttaaaacgcggccacgaacgcggcaagaagcacagtattattattgttgccgaaggtgtaggcagcggtgttgaattcgggaaacgcattgaagaagaaacaaatcttgaaactagggtatctgtattgggccatatccagcgcggaggttctccgagtgctgctgaccgtgtgttagcaagccgtctcggcgcatatgcagttgaactgctgcttgatggaaaaggcggacgctgtgtaggtatacaaaacaataagcttgtagaccatgatattatagaaatacttgagacaaaacacacagttgagcaaaacatgtatcagctttcaaaagaactgtctatctaatgtgcagatgaaggctgaagatttcagaaggaagtgaaccaaatgagaaaaactaaaattgtttgtaccatcggtccggcaagtgaaagtattgaaatgcttacgaaattaatggagtcaggaatgaacgtggctcgattaaacttttctcacggagattttgaggagcacggtgcaagaattaaaaatatccgcgaagcaagcaaaaaacttggcaagaacgttggaattctgcttgatacaaaaggtcctgaaatccgcacacatacaatggaaaacggcggtattgagcttgaaacaggcaaagagctcattatttcaatggacgaggttgtaggaacaacagataaaatttcagtgacatatgaaggtttagtccatgacgttgaacaaggttcaacgattctgttagatgacggccttatcggtcttgaggtacttgatgtagatgccgctaaacgcgaaatcaaaacaaaagtattaaacaacggaacactcaaaaataaaaaaggtgttaacgtaccgggcgtaagtgtcaatcttccgggtattactgaaaaggatgcgcgagacatcgttttcggtattgagcaaggagtagacttcatcgcaccatctttcattcgacgttctacggatgtgctcgaaatccgtgagcttcttgaagagcacaacgctcaggatattcaaatcatccctaaaatcgaaaaccaagagggcgttgacaacatcgatgcgattctcgaagtgtctgacggcttaatggttgcacgcggagacttaggtgtggaaattccagctgaagaagtgccgcttgtgcaaaaagaactgatcaaaaaatgcaacgcgctgggcaaacctgttattacagcgacacaaatgcttgacagcatgcagcgcaacccgcgtccgactcgtgcggaagcaagtgacgttgcaaacgcgatcttcgacggaacagatgcgatcatgctttctggtgaaactgctgccggaagctatccggttgaagcagttcaaacaatgcataacatcgcgtcccgttctgaagaagcattaaattataaagaaattctctcaaaacgcagagaccaagtaggcatgacaattacagacgcaattggacaatctgtcgcgcatacggcgattaacctgaatgctgctgcgatcgtaacgccgacagaaagcggccatacagcacgtatgattgcaaaataccgtccgcaggctccgattgttgcggttactgtaaatgactctatttccagaaagcttgccctcgtatctggcgtattcgcggaaagcggccaaaatgcgagctcaacagatgagatgcttgaggatgctgtccaaaaatcattgaacagcggaattgtaaaacacggcgatcttatcgttattacagcaggcactgtcggtgagtccggcactacgaacttaatgaaggttcatactgtcggcgatatcatcgctaaaggccaaggcattggacgcaaatcagcttacggtccggttgtcgttgcacaaaatgcaaaagaagctgagcaaaaaatgactgacggtgcggtacttgttaccaaaagcactgaccgtgatatgattgcatcccttgaaaaagcgtctgctcttattacagaagaaggcggtttgactagccatgctgcggtagtcggattaagccttggcatcccggttatcgtgggtctggaaaatgcgacatctattttgacagatggccaggatattacagttgacgcttccagaggtgcagtctatcaaggccgtgcgagcgttctttaattacaggtgaaaatggaaggggaatcccttccttttctctttatcatgccttttgttgaacagaacgtgttacacgtgtggggggcttggatatgagatttttgtttttgctttttattgtgtttccggcaatagaaatcggcatattcctatttttaggcaagctgattggcattttaccgacagttctattcatgattctgactggcattatcggcgcagcagctgcaaaaaaacaaggaaccgaagtgtattataaggttcagcgtgatcttcaatatggcaaaatgccgggagaagcgattgctgacggtctgtgcattttcattggcggtctattgctgatgcttccgggctttttatcagatttggccggcgcctgtcttcttatcccgtttacccgcggctggtgtaagccgattctgttcaaatggctgagaggtatgtcgaagaataagcggatcatcatcaaataaaaaacggtagccatgaaaaaacggctgccgttttatttttgctgaacggtgatataggaccatatttcttttaatgcgcctgttgtgatgaaagcttggatgatgacgagtacagccggtcccgcaatcagtcctaaaaacccgaataatttaaagccggcaaacagggcgatgagtgttgccagcggatcgatcccgatagatttacttagtatcttgggctctgtcagctgccgctgaataagaacgacgaggtacaggataccaattccgatcgcttggggcagctggcccgtaatcgataaatacaaaatccagggcacaaatacggagccggcacctaagtaagggagaagatctacaagcccgattaaaaaagcaattgttgcggcgtgttcaacctttaagagagaaaggccgataaatacaatcaccatcgtgatgaaaacgaggacggcttgtgctttgataaaaccagccattgctttttttaattcgctgctgatcgctttgctgttagctgtcacacgatccggcagaattaaaacaagcatggctttaagcttatgccaatcctttgtcataaaaaaggttgccagaagagaaaaaatcagaaccgccgccgtattgggaagaagagcgaaaaatctcgggatcatctctagaatgtgggacagcaggagcccggcatttttagcggcagaatctccgagtgtctggatatgagtgacgatggaagcctgctggttcgtttccaattcttgaaacaaaagagttaactcgttatagagcggctgaatatgagttgtaaacaatttttcgcaatatgaaataaacgtgctgatatgcggaggcagcgtttttgctagataggctgttcccgttacgatttcggctaccagaatggtaaggacgccgaaggctgcgagcagaaaaaaagcaagaacgcccagaacatttatcgttcgggggaatcctgtcactttgtccaaataatcgacaacaggatgaatcactgaagatagaataagggcgatcaggaacggataagttaacggaaacgaataataggccgcagctatcgaccctgcggtcattgatatgacaaagagggttctgaaaaaaatagtgatataagattgattcacaaaaacggtcctcctctcgtcagcatgtcctattttttatatgtattcacgctgcggctgaatatgaatacattcatcttaaaggagggatggcatgtgtttacacaagcgaatttatttttaattttactcttggctatcgcacttatcgcaaaaaaccaatcattgctctttgctgtatccgtccttttgatcatcaaaatcgttgggcttgatcagaaattatttccgaccatccagtcaaaaggcattaactggggtgtgaccattattaccatcgccgttcttgtcccgattgccacgggagaaatcggatttaagcagcttggagaagcaatgcggtcttcctacgcatggatcgcccttggagcggggatcgcagtggcgctgattgcaaaaaacggcctgaccctgcttgaaaatgatccgcatattacaactgctctcgtgatcgggaccattcttgcagtcgcgctttttggaggagttgcggtggggccgctgatcggagcggggattgcttatttagccatgcagatcgtaaaactgttcacttcataaaaaaaagcggccttaaagccgctttttttttatgcaaaaacccgcaaataaaggcgttttttcggggaaatcacagaatggaaaaaaaaattataggtaaacatttaacaaatgtctgattattgtttataatgagaataggcttaaacttaaataagcttataagaatttgttatgttctttcataagcaaagggttttagttccagcagccagtaaaatgtaagcattttctttttgggggagagaaatacttgcatcgtgctttttaagtaagcctcatgtttttacaacactcttaaaggggaaatttattgaaaaggagatgttatatatgacagcgacacgcggtcttgaaggggttgtagcaacaacatcatctgttagttctattattgatgatacccttacatatgtggggtatgatatcgatgatttgacagagaatgcaagttttgaagaaatcatctacttgctttggcatctaaggctgccaaacaaaaaagagcttgaagagttaaagcagcagcttgcaaaggaagctgccgttccgcaagaaattattgagcacttcaaatcttattccctcgaaaatgttcatcccatggctgctcttcggacagcaatttcattactaggcctgcttgacagcgaggctgataccatgaacccggaagccaactacagaaaggcgatccgccttcaggcaaaggtgcctggcctggttgcagcgttttccagaattcgcaagggtcttgagcctgttgaaccgagagaagattacggtattgcggagaattttctttacacattaaacggtgaagagccttcaccaattgaagttgaagccttcaacaaagcattgattttacatgctgaccatgagctgaacgcgtcaacgttcacagcgagggtctgcgtcgcaacactttctgacatctattcaggcattactgcagcaatcggcgcgctgaaagggcctcttcacggcggagcgaatgaaggcgttatgaaaatgctgacagaaatcggtgaagtggaaaacgctgagccgtacatccgcgctaaacttgaaaagaaagaaaaaatcatgggattcggccaccgtgtgtataagcatggtgatccgcgcgcgaagcatctgaaagaaatgagcaagcgcctgaccaacctgacaggcgaaagcaaatggtatgagatgtcgattcgtatagaagacatcgtcacatcagagaaaaagcttccgcctaacgttgatttctattcggcttctgtatatcacagcctcggtattgaccatgatttgtttacaccgatttttgctgtaagcagaatgtccggctggctcgctcatattcttgagcagtatgacaacaaccgtctgatccgcccgcgggcagattacacaggccctgacaaacaaaaattcgttccgattgaagaaagagcctaaagaaccattggaggctggcttgcgtcaatgaggttagcctcttgttcagaacatcaaaattgggttacactttaaattgaatgttaggaaaaatcattttattttctatataagaaaaataaaatgttttctaaatatgaattacatactgggaggtttttattgtggcacaaggtgaaaaaattacagtctctaacggagtattaaacgtaccaaacaacccgattatcccatttatcgaaggagacggaaccggtcctgatatttggaacgcggcttcgaaggttttggaagcagcagtagaaaaagcatacaaaggcgaaaagaaaattacatggaaagaagtttacgccggagaaaaggcttataataaaacaggtgagtggctccctgctgaaacattagatgtgatccgcgaatatttcatcgcgattaaaggcccgttaacgacacctgtcggcggcggtatccgttctttgaacgtagcgctcagacaagagcttgacctattcgtctgcttaagacctgtaagatactttactggagtgccgtcaccggtaaaacgccctgaagatactgatatggtcatcttccgtgaaaatacagaagatatttacgcaggcatcgagtatgcaaaaggctctgaagaagtgcaaaagcttatcagcttccttcaaaatgagttaaacgtcaataaaatccgtttccctgagacatcaggtatcggcattaagcctgtttcagaagaaggaacaagccgcttggtcagagctgccattgattatgcgatcgagcatggccgcaaatctgtaacacttgttcacaaaggaaacatcatgaagttcacagaaggcgccttcaaaaactggggctatgaacttgctgaaaaagaatacggagataaagtcttcacatgggctcaatatgaccgcattgctgaagaacaaggaaaagacgctgccaacaaagcgcaaagcgaagcggaagcagcaggaaaaatcattatcaaagacagcattgctgacattttccttcagcagatcttaacgcgtccaaacgagtttgatgtcgttgcgacaatgaacttgaacggagattacatttctgatgctcttgctgcgcaagtcggcggaatcggcattgctcctggagcgaacatcaactacgaaacaggacatgcgattttcgaggcgacgcacggaacggctcctaaatatgcaggccttgataaagtaaacccatcttcagttattctttcaggcgttctgcttcttgagcatttaggatggaacgaagcggctgatttggttatcaaatctatggaaaaaacaatcgcttctaaagtcgtaacttacgattttgccagattaatggacggggcgactgaagtgaaatgttcagagttcggagaagaactgatcaaaaacatggactaagcaaggaaaaagcctaaaactagccataaaggagaagagagacatgggaaatactcgtaaaaaagtttctgttatcggagcaggttttaccggagctacaactgcatttttaatcgctcaaaaagagctggcagacgttgttcttgttgacattccgcaattggagaacccgacaaagggaaaagcgcttgatatgcttgaagcaagcccggttcaaggctttgacgcaaaaattacgggaacatccaattacgaggatacagccggctctgacattgttgtcattacagccggtatcgcaagaaaacctggtatgagcagagatgatctggtctctacaaacgaaaagattatgagaagcgttacgcaggaaatcgtgaaatattctcctgactctattattgtggtgctgacaaatcctgttgatgcaatgacatacgcggtgtacaaagaatcaggcttccctaaagagcgtgtaatcggccagtcaggtgtgcttgatacggcaagattcagaacatttgtggcagaggaattaaacctgtcagtgaaagatgtgactggtttcgtactcggcggacacggtgacgatatggttccgcttgtgcgttattcttatgctggcggtatcccgcttgaaactcttattccgaaagaacggattgacgcaattgtggagcgcactagaaaaggcggaggcgaaatcgtgaatcttcttggaaacggaagcgcgtattatgcgcctgcggcttctctgacagaaatggtcgaagcgatcttgaaagatcagcgccgcgtccttcctacaattgcttatcttgaaggggaatacggctatgaaggcatctaccttggtgttcctacaattgtaggcggcaacggtcttgagcaaatcattgaacttgaactgacagactatgaaagagcgcagctgaataaatcagttgaatctgtcaaaaatgtcatgaaagtattatcctaataaaaagagagaaaggcttgcttaatacagcctttctctttttactataaatgaaagcgctatcataaacgtctttatttcttttaaaaatgatgtaaaaggcgaattgtcggaatgtcctgctttcgctaaaataaaatcatgaaacatgttaagatgacataaaatagagaaataggatgtcggggaattataatactggaggcacagcatgaacaagaaaattttagttgtggatgatgaagaatctattgttactcttttacagtacaatttggaacggtcaggctatgatgtcattaccgcctcggatggggaagaagcactcaaaaaagcggaaacagagaaacctgatttgattgtgcttgatgtgatgcttccaaaattggacggaatcgaagtatgcaagcagctgagacagcaaaaactgatgtttcccattttaatgctgacagcgaaggatgaggaattcgacaaagtattagggctggagctcggtgctgatgattatatgaccaagccgttcagtccaagggaagtaaatgcgagagtcaaagcgattttaaggcgttcggaaatagctgcgccctctagtgagatgaagaacgatgaaatggaaggccagatcgtaatcggcgatctgaaaatcctgcctgatcattatgaagcgtactttaaagaaagtcagcttgaactgacaccgaaagaattcgaactgctgctctatttaggcagacataaaggcagagttctgacaagagacctgctgctgagcgcagtctggaattatgattttgccggagatacgagaattgttgatgtgcacatcagccatcttcgcgacaaaattgaaaacaataccaaaaaaccgatctacattaaaacgattaggggattggggtataaactggaggagccaaaaatgaatgaataaataccgtgtgcgccttttttctgtattcgttgtctgtatgattctggtgttttgtgtcctcgggctgtttttacagcagctttttgaaacatctgatcaaaggaaagcagaggaacacattgaaaaagaagcaaaatacttggcttcgcttcttgatgccggcaatctgaataatcaagcaaatgagaaaatcattaaagatgcaggcggcgcgcttgatgtgagcgcatccgttatcgatacagacggtaaggtgctgtatgggtcaaacggtagatcggctgattcccaaaaggtgcaggcgcttgtttctggccatgagggtattctgtcaacaacagataacaagctttattacggactttcacttagaagcgaaggtgaaaaaacaggatatgtgctgctttccgcctctgaaaaaagcgacggcttaaaaggcgaattgtgggggatgctgacggccagtctttgtaccgcatttatcgtcattgtttatttttattccagcatgacctcacgttataaaaggtcaattgagtcagcgacaaatgtagccacagaactctctaagggcaactacgatgcacggacgtacggcggctatattaggcgttctgataagctaggacatgcgatgaacagccttgccattgatctgatggaaatgacgcgaacgcaggaaatgcagcgggatcggctgctgacagtcattgaaaacattggctccgggctgattatgatcgacggaagaggctttattaatctcgtaaacaggtcttacgccaagcagtttcatatcaatccgaatcatatgctgcgccgtctttatcacgatgcatttgaacatgaagaagtgatccagcttgtcgaagacatttttatgacggagacaaagaaatgcaagctgttaagactgccgatcaaaatagaacggcgttattttgaagtggacggcgttccgattatggggccggacgatgaatggaaaggaattgtgctcgttttccatgacatgacggaaacgaagaaattagagcagatgaggaaggattttgtggccaatgtttctcatgagctgaaaacaccgattacgtccataaaagggtttacggagacgttattggacggggcgatggaagacaaagaggcgctttctgaatttctctctattattcttaaggaaagcgaaaggcttcagtctttggttcaggatttgctcgatctctcaaaaatcgagcagcaaaatttcacgctcagtatcgaaacgtttgagccggccaaaatgcttggtgagattgaaacgcttctgaagcataaggcggatgagaaaggcatctccttgcacctgaatgtcccgaaagaccctcaatatgtatctggtgacccgtacaggctgaaacaggtatttcttaatctcgtaaacaatgcattaacctacacgcctgaggggggctccgtggctatcaatgtaaagcccagagaaaaagacattcagattgaggttgccgattctggaatcggaattcagaaagaagaaattccgcgcatctttgaacggttttaccgcgtagataaagacagaagcaggaattcgggcggaaccgggctgggcctagcgattgtcaagcatttaatagaggctcatgaagggaaaattgatgtcacaagcgagcttggacggggaactgtctttaccgtgacgctgaaacgggccgctgaaaagtccgcctaatgtttacaaaggtttaacaatatcttcatgcactgttaaacctatgctggtaggatgtagtagaaccccttcatccaaggagccaattttgacggcgggaacctatttgtgttcccgtccttttttgtgtcttctcttatagttcacgtattttcctttcaaattgaactttgttaaaataagaggagctaatgactatgtaagagatgaatggaagcctgaggcttcttaggaggaaattgaatgacggaacgaaaaaaattagtgcttgtagacggaaacagtctggcttaccgggcgttttttgcattgccgctgttaagcaatgataaaggtgttcatacgaatgctgtatacggctttgcgatgattttgatgaaaatgcttgaggatgaaaaaccgacgcacatgctggttgcgtttgatgccgggaaaacaacatttcgtcacggcacatttaaagaatataaaggcggcagacagaaaaccccgcctgagctttccgaacaaatgccgtttatccgcgagctgctggatgcctaccagatcagccgctatgaactggaacaatatgaagcggatgatattatcggcacactggccaaatcggctgaaaaagacggatttgaagttaaggttttctcaggagataaggatttaacccagctggcaacggacaaaacgacagttgccattacgagaaagggaattaccgatgttgaattttacacaccggagcatgtcaaagagaaatatgggcttacgcctgaacaaatcattgacatgaagggtctgatgggcgattcctcagataatattccgggtgtgcccggcgtcggagaaaagactgcgattaagcttttaaaacaatttgattccgttgaaaagctgctggagtccattgacgaggtgagcggaaagaaattgaaggaaaagcttgaggagtttaaggatcaggcattgatgagcaaggagcttgcgacaattatgacggatgctccgattgaggtatctgtttccggcctggaatatcaaggctttaatcgtgaacaggtcattgccatctttaaagatcttggcttcaacacgcttcttgaacggcttggagaagacagtgcagaagcagaacaggatcaatcgttggaagacattaatgtcaaaacagtcacagacgtgacaagcgatatattggtttctccatccgcatttgtcgttgaacagattggcgataattatcatgaagagccgatcctcggattttcgatcgtaaatgaaacgggagcttatttcattccgaaagacattgccgttgagtctgaggtgtttaaagaatgggtggaaaatgacgagcagaagaaatgggtcttcgacagcaagcgggccgttgtcgctttgcgctggcagggcattgagctgaaaggagccgagtttgatacgctccttgcggcttatatcatcaacccgggcaattcatatgacgacgttgcgagtgtggctaaggattacggcctgcatatcgtttcaagtgatgaatcagtttatggaaaaggagcaaaacgggcagtgccgtcagaagacgtactgtctgagcaccttggccgaaaagcgttagcgattcaaagccttcgggaaaagctcgttcaagagctggaaaacaacgaccagcttgaactgtttgaagagctggaaatgcctcttgcgcttattcttggcgaaatggaatcaactggagtcaaggtcgatgttgaccgtttaaaacggatgggtgaagaactgggtgcgaagctgaaggaatatgaagaaaaaatccatgagattgcgggagagccgtttaacatcaattctccgaaacagctaggcgtcatcttatttgaaaagatcggccttcctgtcgtaaagaaaacgaaaacaggctattctacgtctgccgatgtgcttgaaaagctggctgacaagcatgatattgtcgactatattttacagtacagacaaattggcaagcttcaatcaacatatatcgaagggcttttaaaggtgacgagaccggattcgcataaagtgcacacgcgatttaaccaggccttaacgcaaactggccgtctcagctcgactgatccgaacctgcaaaacattccgatcaggcttgaggaagggcggaaaattcgccaagcttttgtgccgtctgaaaaagactggctcatttttgcagccgattattcacaaatcgagctgcgggtgcttgcccatatttcaaaggatgaaaatctgatcgaagcttttactaatgatatggatattcacacgaaaacggcaatggatgtgttccatgtcgctaaggatgaagtgacatctgcgatgagacgccaggcgaaagcggtcaactttggcattgtttacgggatcagcgattacggtctgtcacagaacctcggcattacccggaaggaagcgggagcatttatcgaccgctatctggaaagcttccaaggcgtaaaagcgtacatggaagattcagtacaggaagcgaaacaaaaaggatacgtaacaacgcttatgcatcgccgccgctacatccctgagctgacgagccggaactttaatatccgaagttttgcggagcggacggccatgaatacgccgattcaaggaagcgccgctgatattatcaaaaaagccatgattgacatggctgccaagctgaaagaaaaacagttgaaagcaaggcttctgcttcaagtacacgatgaattgatttttgaggcgccaaaggaagaaattgaaattcttgaaaagcttgttcctgaagtgatggagcatgcgcttgcattagatgtgccgttaaaggtggactttgcatcaggcccatcttggtacgatgcgaaataaacagagataggaagtgatggatgtgccggaattaccagaggttgagacggtccggcgcactctgaccgggcttgtaaagggaaaaacaatcaaatcggtagagatcagatggccgaatatcatcaaacggcctgccgaaccggaggaatttgcgcgaaaactagcaggagaaacgatacagtccatcggaagacggggaaagtttttactgtttcatttagatcattatgttatggtttctcaccttcgaatggaaggaaaatacggtcttcatcaagccgaggagcctgacgataaacacgtgcatgtcatattcacgatgacggatggaacccagctccggtacagggatgtgcggaaatttggaaccatgcacttatttaaaccgggagaagaagcgggcgagctcccgctttctcagttagggccggagccggatgcagaagaatttacaagtgcgtatttaaaagaccggcttgcgaaaacaaaccgcgctgtcaaaactgccctactggatcaaaaaacggtagttggactcgggaacatttatgtggatgaggctcttttcagagcgggtgtccatcccgagacaaaagcaaatcaattatcagataaaacaatcaaaacccttcacgctgaaatcaaaaacactctgcaggaggcgattgatgcgggcggaagcacagtccgttcatatatcaactcccaaggggaaatcggaatgttccagctgcagcattttgtgtacggaaaaaaagacgagccatgcaaaaattgcggaacgatgatttcgaaaattgtcgttggaggaagaggcacgcatttttgcgcaaagtgccagacaaaaaagtagcataatgcttcattgtccaagctgtcggtgcatatatcagtaactctggattaaggatgccattttcgaaacacggatttttcactttcccatatatatgattgtgatgaatcccgggcatttcacatctgatacaagagcaccaacagaaaggaagaaacggatatgcaaatggtttctatactgctgctggcgttggctgtcagcttggacagtttttcagtcggatttacgtacggattgagaaaaatgaaaataccgtttaaagcgattttggttatcgcctgctgttccggtgctgtcatgtttatatccatgctgatcggaagctttctcacgaagttttttcctgtatatgtgacggagaagcttggcggtttgatattggttggaatcggtgcgtgggttctgtatcaatttttcaaaccggcaaaagataaagaatacctattgcatgaaaaaacactgcttaatctagaggttcggtcattaggaattgtgattcatattttgagaaaacccatgagtgcggatatcgacaaatcgggtgtgatcaacggaattgaggcggtcttattgggatttgccttatcgattgatgcctttggagcaggtataggcgcagccattctcggtttttcgccgattgtgatgagcatcgccgtggcaatcatgagctcgctgtttgtatcaattggaatcaatgccggccattttctgtctaagtggaaatggatcgataaaatggcgtttttgccggggcttctattaatcacgattgggctctggaaattgtaaaaaggagtggatctcttgaccttagtcattggtttaacgggaggaatagctagcggcaaaagcacggtagccaatatgctgattgaaaaaggaataacagttatagatgcagatatcattgcaaaacaagcggtagaaaaagggatgccggcctaccggcaaatcattgacgaattcggtgaagacatactgctctcaaatggcgatatagatagaaaaaagcttggagcgctggtatttacaaatgaacaaaaacgtctcgctttaaatgcaattgttcatcccgcagtcaggcaggaaatgctcaatcgccgtgatgaagccgttgcaaatcgggaggcatttgttgtattggatatcccgctattgttcgaaagcaaattggaatcattggttgataaaattattgtggtcagtgtgacaaaagagcttcaactggaacgtctgatgaagcgcaatcagctgacagaagaagaagcagtcagccgtatccgctctcaaatgcccttagaggaaaaaacagcaagagcagatcaagtcattgataacagcggcacgcttgaagagaccaaaaggcagcttgatgaaatcatgaacagctgggcataatacaaaaaacaccgttcatattgaacggtgttttttggccattaaaaatcaaagttgtccggatcaggaccgacgcgcaagttttcattcagtgcatcgattcggttcatgtcatcctgcgttaattcaaagtcaaatacgcttgcattttctttaatgcggtgttccttcgttgatttaggaatcgttataatgccatgctgcagatcccagcgcaaaataatttgtgcgacagatttattatatgtttgagcgatgtcagccaatacagggtgatccagcagctgtccctgcattaaaggtgaccaagcctccatctggatgccctgattttggcagtatcttatcaactctttttgtgtgaggcgcgggtgaaattccacttggttaatcataggcttaatttcagctgccgtcatcagatcttcaagatggtgaatttggaagttgcttacgccaatcgctttgatacggccttctttatacagcgtttcaagcgctctccaagcttctttatactttccttctacaggccagtggatgaggtatagatccaaataatccagaccgagtttggacagacttgtttcaaacgcggcgagtgtttcttcgtagcctaaatccgcattccatactttcgatgtgataaacagatcctctcttgaaatgcctgcttcttcaatgccttcccgaatcccttctccgactccagcttcatttccatagattgctgcagtatcaatactgcggtacccgtgaacaatggcagttttaactgcgtttaccagttcagatccttcttccacttggaacacgccgaggccgaaccaaggcatttctaccccattatgaagtgttgcttttgcttgtaaatgtgttgtcatgtttatttcctcctttaaaattgtcaggcttcctgccgatctcgtttttccatcaagcggctccagcctgttaaaatgactgcaccgaccaccattaatccgcctatccaagcggtatgaatcaatccgattgaatcggtgatcacaccgccaaggtatgacccaagcgcgatccctgcattaaaggcagcgatattcatcgcggatgcgacgtcaactgcactcgggacaaaacgctcagccagcatgacgacatacacctgaaggccgggcacgttcataaaggccagcaatcccatacagagaatggtaatgagccctgctgcttgatacggggctgtaaatgtcagtacgaatagaacaattgcttgtacgataaacatatagaataaagcggcaatcggatttcggtttgacagctttccgccaatcatattgccgatagcaatagctattccgtatccgagcagaatcactgcaacagtcccggctttgaagcctgttacttcctgaagcaggggagacagatacgtgaacacaacgaatgttcctccgtatccaagcgctgtaatgacaaataaaagcaataaccggctgtttgtcacaagcttcaattgatcccgcatcgttgttttcgtcccttttcgtaatttggacggtacaagaatgccatttgtaatgaaagcaatgattccgacggcgataatgaccataaaggcgaaacgccagccgaactgctggccgataaatgtcccaaaaggaactccggttacagttgccacagtgaggccagtaaacataattgaaatcgcgctagcccttttatcctccgggacaatatccgctgcgattgtcgaaccgatcgacataaacacaccgtgcgaaaatgccgatatcacacgtgctgctagtaaaatcccgatgcttgaagcggttgctgccatcgtattaccggcaataaaaataaacatgatccaaagcaatagtgtcttacgtgacatgcttgaggtcaatgaagttaatataggtgccccaaatgtaacgccgagcgcataaagggaaacggtcaatcctgctgtcgtgacgggaatatccaggtcatcagcaatgagcggcaaaaggccgacactgataaattcagttgtccctattgcgaatgcacttacggccaaagccagtagtgcaggaatattgcttttattggctgaagtcatgatgttcctcctttgtaagatgtgttgtatgattgaaattctgccgagtaagctatataaataaaaaagagcagattcaaatcagccggcaaatgtgattatgaaacatatcgttaagaaataaaagtacgtactttgaagtgctatagtcactttttggtgcctgtgaggagaatggattgtatggagaagaaaaaatataacatttctgttgaagcgactcttgaagtgatcggtgggaaatggaaatgcgtcattttatgccatctgacgcacggaaaaaaacgcacaagtgaattaaaacgcctaatgcccaatatcacgcaaaaaatgctgactcagcagctgcgcgagctggaagcggacggtgtcattaaccgaatcgtatataatcaagttcctcccaaagtggaatacgagctcagcgaatacggccgcagcttagaagggattttagatatgctgtgtgcttggggagcgaatcatattaacagagtgtacggggatacattttctgtgctagaagaaagtgtgctcaatgataagttaaaacaggaatcataaagcatgagggcagtcagtgcggagcgctggctgctttttggttcttacgcctgatattctgtgcaagaaaacataagatgcatcataaattagcgttataatcgttgatttttatcaatatgtactggcgaatttgttttaatgtgttatactaattttagatagtaacaaattaggatggcataattgataaggggtgtccaacatgaaggtaaaagtagcgatcaacgggtttggaagaatcggaagaatggtttttagaaaagcgatgttagacgatcaaattcaagtagtggccattaacgccagctattccgcagaaacgctggctcatttaataaagtatgacacaattcacggcagatacgacaaagaggttgtggctggtgaagatagcctgatcgtaaatggaaagaaagtgcttttgttaaacagccgtgatccaaaacagctgccttggcgggaatatgatattgacatagtcgtcgaagcaacagggaagtttaatgctaaagataaagcgatgggccatatagaagcaggtgcaaaaaaagtgattttgaccgctccgggaaaaaatgaagacgttaccattgtgatgggcgtaaatgaggaccaattcgacgctgagcgccatgtcattatttcaaatgcgtcatgcacgacaaattgccttgcgcctgttgtaaaagtgctggatgaagagtttggcattgagagcggtctgatgactacagttcatgcgtatacgaatgaccaaaaaaatattgataacccgcacaaagatttgcgccgggcgcgggcttgcggtgaatccatcattccaacaacaacaggagcggcaaaggcgctttcgcttgtgctgccgcatctgaaaggaaaacttcacggcctcgccttgcgtgtccctgttccgaacgtctcattggttgatctcgttgttgatctgaaaacggatgttacggctgaagaagtaaacgaggcatttaaacgcgctgccaaaacgtcgatgtacggtgtacttgattactcagatgaaccgctcgtttcgactgattataatacgaatccgcattcagcggtcattgacgggcttacaacaatggtaatggaagacaggaaagtaaaggtgctggcgtggtatgacaacgaatggggctactcctgcagagttgttgatctaatccgccatgtagcggcacgaatgaaacatccgtctgctgtataaaataaggtcatggacacattttaaagaaaaaacccttaacagcatatttctgaaaaaacgcaccttgcaaattagacttaaacacagtatactatttttcgtgaacttcttgcttgagactgtttcggaattacttaaagggttaggacctctccggactaactttcccccgtggtaaatggccgacccagttgttggaatttcactttttaattcttgttaaggggggtccatgactatggaaacaatggggcgtcacgttatctccgagctatggggatgcgattttgataagctgaatgacatggattttattgaaaaaacgtttgtaaatgctgctctaaaatcaggtgctgaggtgcgcgaggttgcatttcacaaatttgcaccgcaaggcgtaagcggagttgtgattatttctgaatcacacttaacgattcacagttttcctgagcacggatatgcgagcattgatgtttatacttgtggagacttagatcctaatgtcgctgctgattacattgcagaggcattacatgctgatacaagagaaaacattgaaataccaagaggaatggggcctgtgcaaattaaacaggcgcaagcgaaagtactataaagtaaattgcgaacacaaagggagctgaagctagaaagccattatgcgctttttagcttatgctccttttatttttataaagaaacgagagtgtcagctttttcttttttcattttttttgtaaaataagaaggagattttcacaaaccacctaatgctatagaaacaaatttaacaacggctctcccgacagatgctgtcacatctatttttaaaaggcggaggctgccgaaaatacattgcagggaacgatatagttgggagctgattttattgaaatgtccttcatgccagcataacggaacacgagtccttgattcacggcctgtggatgacggaaagtcgattcgccgaagacgcgagtgcgaatcctgccactaccggtttacgacctttgagaaagtggaggaaaccccgctcatcgttgtgaaaaaagaaggtgtgcgtgaggaattcagcagagaaaaaatgctgcgcggcctcataaaagcatgtgaaaaaaggcctgtttcactcaaaacgcttgaagacatgtgctttgatattgaaaaagaacttcgcaatcaaggctgctccgaggtgaagagtgagctcgtcggagaaatggtcatggaccggctggctaagattgacgaagtcgcatatgtgcggttcgcgtccgtctatcggcagtttaaagatataaacgtctttatcgatgaattaaaagacttaataaagaaagagcgttaaaagagctaagaggattcttctagctcttttctcatgtgcaaaattggcatttgatagatataagaaacggtgtaaaatgaaaggtagaaacaaattcggaaggtttgagaatgtatggctgactattggaaagatgtactgcctgtagacccgtatgtggttaaaagcagatcgatgctgcaggatattgacagacaaattattacacaactgtaccagcccttaatcggccctgttgcattctctctttatatgacattgtggggagagcttgaacaaaaccgtctgtggggcggagagtccacacatagacagctgatggggatgacacagtccaacttaaaaacgatccatcaggaacaggggaagctcgagggcatcggattgctgaaagtatatatgaaagaatccgagcggcaggagcgcctctttatatatgaactccttccgccgctcagaccaaatgaattttttgaagacggaatgctgaatgtttttctgtataatagggtcggaaaaacgaaatatcagcaattaaaacaattttttacgcacccggccatttcagaagatgcgaaggacattacgcgtccgtttaatcatgcgtttgaatcgctgcagccgagtgaatggaagctcacatccgatatggaggaaacggtaaggcttgccgaggggtccgagtatacttctgtcggacagtctccgtcctacaccataacggaggatgtgtttgattttgatttgtttttagcgggactttctgagacgatgataccgagaaaagcgatgacccagcaggtgcgggacacaatcaaaaagctttcttatctgtacggaattgaccctttgcaaatgcaaaatgttgtgatgagcgcaattgatgagcgtgacgtcattacgacggaggcattaagaaaagcggcgagcgactggtatcaaattgaaagaaacggacagctgcccgatttggtggaaaaaacacagccggtgcatctgcgtgaaggcgaacaaccggcagaagaggattctctggatgggaagctgattgcattgctggaggcgatttccccgaagaagcttctgcaggacattgctgacggaacagagccgtcaaaagctgatctgaagatcatagaagaaattatgttcgaacagaagctcgagccaggcgtcacaaatgtgttaatttattatgtcatgctgaaaaccgacatgaagctgtcgaaaaactatatccaaaaaatcgcttcgcattgggcacgcaaaaaggtgaaaacggtcagggaagcgatgaagctcgcaatagaagaaaaccgccagtatcttgaatgggctgagggaaaaacaaagtcttcgaaacgaaaccaaaaagtgattcgtgaagaaaagcttcctgattggatgacagaaaaggaaacagcgtccgattcagaatccggacagcagaagctgcatccgcaggatttggaagaacagaagaaaaagatgatggaagaaatgcaaaaactgaaaaaatactctgcctattaaagacagagatgcggggtgaaggaatagatggaaccaatcggccgttccctgcagggcgtaaccggcaggccggatttccaaaaacgtcttgaacaaatgaaggaaaaagtcatgaaagatcaagatgttcaagcatttttgaaggaaaacgaagaagtgattgaccaaaaaatgatcgaaaagagcttaaataagctttatgaatatatcgaacaaagcaagaattgctcctattgttcggaagatgaaaactgcaacaatttgttggagggctaccatccgaagcttgttgtcaatgggaggtctattgatatcgagtattacgaatgtccagtcaaacggaagctcgaccagcagaagaaacaacagtctcttatgaaaagcatgtatatccagcaggatcttcttggagcgacgttccagcaagttgatatcagtgacccaagcagactcgcgatgtttcagcatgttacagacttcctgaaaagctataatgagacgggaaaagggaaaggattatatttatacgggaaatttggggtaggaaaaacgtttatgctcgctgcaattgccaatgagctggcggaaaaagagtattcctccatgattgtttatgtgcctgaatttgtgagagagcttaagaattcgctgcaagaccagacattggaagagaagctcaatatggtaaagaccacacccgtattaatgcttgatgacatcggagcagaatcaatgacaagctgggtaagggatgaggtcatcggaacggtgcttcagcacagaatgtcccagcagctgccaacgttcttttcttctaatttctcacctgacgagctgaagcatcattttacgtattcgcagaggggagaaaaagaagaagtaaaagctgcaagattaatggagcggatattatatttggctgctccgatccgccttgacggagaaaaccgccgacatccataattgctgtggttcaaaggggaaggaactgagggtatgaaacgaaaaacggctgtcaaatggctggcagtgcttgcaggtgctggtttactctattggggaaataaaacgtatttgaatgtatcgccgaaagaaatcagggtatgggtattgtcgttcggagtctttgcacctctgatgtttatcgggatatccatcgtcaggccacttgttttatttccggtgtctgttatttcaatagctggcggacttgcgtttggcccgcttctcggcacgctttatacgttattcggttcgatgtgcgcttcagctgtttcgttttttgcggctggtttgttttcggcgaaaaagaacgggcattacgaaaggcttgaagccatacagaagcaaatggaggataacggatttttctatatctttcttttgagaatcctgccgatcaattttgatttcgtcagctatgcggcaggcctttccaatgtcaaagcgctgccgtattttgccgcaacggctgtgggaatcatccctgggacgattgcgcttaatgtgctgggtgcgagctttttggctggcaatctgcccgctttctttatggtgctcgctttgtatatcgtgtttatctcattgccgttcatcttcagaaagaaaatgcaaaacttgttccaagaatcaaattaagatttgccaatgacctttacgtctattttaaaaacatcccccatatacttgtaacagatgccgtaaggggggacaaacatgcttgaaataatctttgaagatgaccatgatgcagccgcttttttacatctcattcagcattcggacgatcggaacaatatcattgtccgtgaaggcatacgaaaaatcgggattgaaaaagcgaatccggcttttcctattcagcgttttatggagccgattctggtcaaattttttttggaatgcaaagaagacgagcatatgctgtcattgattgaggaaacgtattgtttcacggaccaggatgaacagcagcaaatccttcagctcgcacacagtattattgaaggtgaagcagacgatcttccgtttgagccgctgaagctttcacggaaacaatcaattttggatgaactccaaacgatctgtttagaggaaggagtattttacattcgctcctttcagaccttccgacttggatcatactataagcagctgagagatattacagaagcagcgattgatgaatataagatggaacaggaatatcaaaactttattcaaacactcagagactatgtggacgccaaacagccgcgaatcaaaaaagtgcatattgtccatgatggttcctttacattatgggagctgcgctatgtgccggaacgggaaaaaatgaaatacatagacagaagatttgtccgggatcatcctatgtatattgattctcatttgctcgcgccgctgatttccattgcgcctgatgaagtcgtgctttataccgaccagcccgagcacatgatggcaaggaccattcaaaacgtatttcaagagagagtggaaatgctcccgctgcatgcttttacagatgcagaaataccggtgaagcactcggaaggatgagggccggcagcctgtctatataaggctgtcggtttaaaaaaggaaacgcgatcgtgttgattttttggattgaacaatttataatacataggagattaagaaagacacacgtattgataaggacacgaaggaatgataccagctcaaagagagggaagccctggctgcaagcttcccagctaaggaccattcgctttaccgcctttgaacttcagctgtgaacctcttgaaaaggaacagtaatggctgacgggaactcccgttacagagcttagagccgcaggtgccgtgtattggctttgcggaaaaaagggtggaaccacgattccgtttattcaacctcgtccctttcatagggggcggggtttttatatgcaaaaaaaggagtgacaaagatgtcagatatggtaaaaatcacatttcctgatggagcagtcaaggagtttgcgaaaggaacaacaacagaagatatcgcggcatccatcagtccgggattaaagaaaaagtcattagccggaaaactgaacggaaaagaaatcgatttgagaacgccgatcaatgaagacggtacagtggaaatcattacagaaggctcagaagaaggtcttcaaattatgcgccacagtgcggctcacttgctggctcaagcgattaaacgcatctacaaggatgttaaattcggcgtcggtccggttatcgaaaacggtttttactacgatgtagaaatggacgaagcgattacaccggaggatctgccgaaaatcgagaaagaaatgaaaaaaatcgttaatgcgaaccttccgatcgttcgaaaagaagtcagccgtgaagaagcgaaagcccgttttgcggaaatcggcgacgacctgaagcttgaactattggatgcgattcctgaaggagaaaccgtttcgatctatgagcaaggcgaattctttgacctgtgccgcggcgtccatgttccttcaaccggaaaaatcaaagagtttaagctgttaagccttgcaggcgcatactggcgcggcgacagcaaaaaccaaatgcttcagcgcgtatatggtacagctttcttcaaaaaagctgatcttgaagagcatcttcgtatgctagaagaagcgaaagaacgcgaccacagaaagcttggcaaagaattaaagctgttcgcgaactctcaaaaagtcggacaaggcctgccgctttggctgccaaaaggcgcaacaatccgccgcgtcatcgagcgctacattgtcgataaagaaatcagcctcggctatgagcacgtatacacacctgtgctaggcagcaaagagctgtatgaaacatcaggacactgggatcattatcaggaaggcatgttccctccgatggaaatggacaatgaaacacttgtattgcgtccgatgaactgtccgcaccatatgatgatttacaaacaagacattcacagttaccgcgagcttccgattcgtattgcagagcttggaacgatgcaccgctatgaaatgtcaggtgcgctgtcaggacttcaacgggtacgcggaatgacgttaaatgatgcacacatctttgtgcgcccggatcaaattaaggatgagtttatccgtacagtccgtttaatccaggatgtttatgaagacttcggtttaagtgattacacattccgtctgtcttaccgcgatccggaagatacagagaaatattttgatgacgatgaaatgtggaacaaagcgcaatccatgctgaaagaggcaatggacgaaatcggccacgactattacgaagcagaaggtgaagcggcattctacggccctaaacttgatgttcaggtgaaaactgcgattggaaaagaagaaacactgtctacggttcagcttgatttcttattgccggaacgtttcgacctgacatacatcggtgaggacggcaagcagcaccgtccggttgtcattcacagaggtgtcgtttcaacaatggaacgctttgttgccttcttaatcgaagaacacaaaggcgcgctgccgacatggcttgcaccggttcagttccaagtcatcccggtttctccggctgtgcatttagactacgcgaaaaaagtgcaggaacgcctgcaacgtgaaggcctgcgtgttgaagtcgacagccgcgatgaaaaaatcggctacaaaatccgtgaagcgcaaatgcaaaaaatcccgtacatgctggtggtcggtgaccaagaagcagaaaacggagcggtaaacgtgcgtaaatacggagaacagaactctgaaaccatttcacttgatgagtttgtgaaaaaggcagtagctgaagcgaaaaaataaaataaaaagcatgatctcgttgaagagatcatgcttttttatttctctaatataggaaacaaatcatgaaggctgctgatgatgtaatcaggcgttacgtcagtttcgtttttcttatccgtccggttgatccaaacggttttgattccggctcttgaagcgcctaaaatatcagtattcaaattatcgccgaccatgatggcatcgtctttttcaatattcatcagcttaaggcagtgttcaaaaattgaaacatccggcttgcccttgccgaatgcgcccgagatgacgatttcattgaagtaaggagcgagctcaggtacgccggcaagcttctccttttgcagactcggatcgccatttgtcaaaagcaataattcatacttgccttttaattgatcgagtacagcaaaagtttcatcatatacaaacgggcgttttctgcgctctgccgcaaaaaactctcccaagtattcgccatatgcaggatcatcgatcccaagcgctttcagtccgtttgtccatgcatttcttctgtactccggcacaatcttgttcagcttttgaaagccttcactgattggctctgagaaattggaccacagtccttcaaacgggttaatgccgatcatcactgtatatggatacgtctcatatgacatgtacaattctctcgccgcttcgcgaacagctgcttcgaattcctcagggtcaaggccatattttttctccgcctgtaagcaagtttctgcaaatgttgttctgacgcttttttcgtcccaaagtagtgtatcatctaaatcaaaaaatacggctttcatgatcttctcctctgcttcagattcaaatctttctgccaaaaggctcatgttttattttacaatagataaaagccttgtgaaatatgttttcagacgattttaaaaaaacagtcagccgtaaaacgaaaacatgctagaatgaaaacggaaagaacaggtgacatgaatgattcatttaatgattatgatgctggagagagtggggattattgttatattagggttcattctcgcccatacgaaacttttcagacaagctcttcagaatcaggacggctataaaggaaaagcgattttaatttctattttttctcttttcagcatcatcagcaattatacaggcatcgaaattcaaagaaatatgattgtaaacaatgactgggtgtttacgatagatccatcgggctctatcgcgaatacccgtattttgggcgtggaaatcgggggccttctcggaggtccgtttgtaggggctgggatcggcatactggcgggcctgcatcgtttttcactcggtggcagcacggccttaagctgtgccgtatcatctattttagcgggtgttcttgcaggcttgatcggcaggtattttacgaagcgatatcgaatgccgacaccgcgcatcgccgctcttgtgggaatcggcatggagtcactgcaaatgatcattattttgctgatggcaaagccgttcagtgacgcttgggagcttgtcagcatgatcggaattccgatgatactcatcaatggaacaggcagttttatttttctgtctattattcaagcgatcattcgcaaggaagaacaggcaagagctctcgaaacacatcgagtgctgacgattgctgatcagacacttccattttttcgccaaggattaaatgaaaactcctgtaaaagtgtagcggctattatccataagctgacaggaacagatgcggtgtctctcactgacaaagaaaagatccttgctcatgtcggtgcgggaatggatcaccacatcccatcgaaaagtttgatcaccggcctgtccaaaaaggtgattaaaacagggcatattatgaaggcgatttcgcaggaagagattgaatgcacgcatgctgaatgccctttgcacgctgcaattgtcctgccgctgacatcgaacggcaatacaatcggcaccttaaaaatgtactttaaaagcccggcaggcctgagtcaggtagaggaggaacttgccgaggggctggccatgctgttttcgacacagcttgagcttggggaagcagagctgcaaagcaaacttctcaaggatgctgaaattaaagcgcttcaagcacaggtgaatccgcattttttatttaatgcgatcaacacgatttctgcgctatgccgtacagatgttgaaaaaacccgtaagctcctattgcagctaagtgtttattttcgttcaaaccttcaaggagcgagacagctgctgattccgctctcaaaggagctgaaccatcttaacgcctatttgtcattagaacaggcgcgttttcccgggaaatataaaattgagcttaatatcgacagcagactggagcagattgaaatccctccgtttgttttgcaggtgcttgtcgagaacgcgcttcggcacgcgtttccgaaaaaacaagacatgtgcaaggttacagtctgtgtcttatctgatgatgcatccgtctatatgaaggtgacggataacggacgcggaattccgccggacgtcttgccggaactgggaaagaaaccgtttccgtctaaggagggaaccggtacagcgctttataacctaaatcagcggctgatcggtttattcggacagcaggctgcactgcatatcagcagtgaggttcataaagggacagaggtttcctttcaagtgccaatgcaacagatgaaagagggagaagaacatgctcagggtgttaatagttgatgatgagatgctggcaagagatgaactggcttacttgcttaagcggaccaatgaggatatggaaatcaatgaagcggaaaatatcgaatccgcttttgaccaaatgatggatcaaaaacctgatttgctgtttttagacgttgatttatccggagaaaacggttttgatatcgcaaagcgattgaagaaaatgaagcatcctcctgctgttgtgtttgcgacagcgtatgaccagtatgcgctcaaagcgtttgaggtggacgctcttgattatttaaccaagcctttcgatgaagaaagaattcagcaaacgctgaaaaaatataaaaaagtcaatcgggatattgtagaaacagagcaaaacagccatgccggccagcacaagctcgcgctatctgtgggggaatcgattgtgattgtggatacgaaggacattatctatgcgggaacagaagatggtcatgtcaatgtaaaaaccttcgatcattcttatacggtcagcgatacactcgttgtgattgagaaaaagctgccggattctgattttatccgcgtccatcggagctttgtcgtgaataccgaatatattaaagaaattcagccatggtttaattcaacgtataatctgatcatgaaagacggatcgaaaataccggtcagccggacatatgcgaaggaattgaaaaagctgctccatatttgatgggcggctttttgcatttcagccatttgattctgcaactcagacacgctattcggcatgttatcttgtaagcgctttataacaggggattcttatttataatgagggtaccaaagagaaagaggtgaagaaaatgagtgctaaaaaagtgtacgggtttttaacacaagcatttatttttgccgtcattatgctggtttcaaatatgattgccgctattgtcccaatacctatcccggcatcggttgtagggttggtcttattatttctcctattatgtttgaaagtcattaaactggaacaagtggaaacgctcggaacgtctttaacctctctgatcggatttttatttgttccgtcaggtatatctgttatgaattcgcttggtgtgatgcagcaatacggcctgcaaattgttcttgtcattctgctcgcaacgattattctgctgggggctacgggattgttttctcagctgattctttcgctgagcggaaaacgcaaaaccgaagcggacatgaaaacaaaaacagtgcaaagcccgcagaacaataacgaactcgttcaccattaagggaatcaggaggttcttcacatggaaagcacaatgagtccttattttgggattgtcgtatcacttgctgcattcggcatcggcacctttttatttaagaaaacgaaaggcttcttccttttcactcctttgtttgttgccatggtgctggggatcgcatttttaaaaatcggcggtttttcctacgcggattataataacgggggagagatcattaagtttttccttgaaccggcaacgatcgcatttgcaattcctttgtacaaacaaagagataagcttaaaaagtactggtggcaaatcatggcctccattattgccggctctatctgctctgtcacgattgtttatttgctcgctaaaggcattcatctcgattcggccgtaatgaaaagcatgcttccgcaggcggctacaacggcaattgcgcttcctttatcaaaaggcatcgggggcatcagcgacatcacagcctttgcggtcatctttaacgctgtcatcgtatatgcgctcggagcattgttcttgaaggtgtttaaagtgaaaaatccgatttctaaaggattggctcttggaacatccggacatgcacttggtgtagcggtcgggattgagatgggagaagttgaagctgcgatggcaagtattgctgttgtcgtagtaggagtggtaacggttctggtcatccctgtgttcgtgcagctgatcggaggataagccaaggctgaatgccttggctttttttattttatggtgcgtcttcgggatcgatatacccttgtttaatgccccattctacttgatcgtcatgccacttttttcgttcttcataaccataaccatcgtcatcaggaagctctgaagctggctgttgaatggttttatctgtctgactcgaggaagatggtggatttttactattagatgagggtgcctcggtctgctgccgttgtgcctgtgattgccgctttttctcagcgttcgctttctgctctttttggattgctgcctgccgctgtctttcaagttcagcttgtctttttgcttccgctaatcgctgattctccgccgcctgctgctctgctaatcgctgtctctccgctttttcctcctgctgtttctttcgtttcgcctcccgctctttttcaagttttttctctgcggcgatttgtctttgcttttcagcttcttcttttgctttccgctttcctaactcagtagcaagtggactctcgaacttcatgtccaatgaaacgggttttagtttttttagctctttctccagccccttttgaggaaatgctgccgttgtcttaacagtttcgacttttgattcggaagatgtgctgctattcgagcaaccggttaatatcaatgtgaaaaataaagcaagctgtatcagtttgttcatgtgtcaggctcccttctgcttcttatatcggtcagagattaactttgttttacatttcttcctgtcggtggttttgttgtaaattgcgaaataaggggggaattgttggttctttgtattctgggtggggatgaaagattttctttttctctcttgcgctcatagaaaacccatgttacaatgtaaaagttgttccggataagtcgtccttgactaaagatccggtattgtgtagaatagttattgaattgaatataaatcacaagcagaagcacccgcttctcacctgattgacacatgcatgtagttggcaggttgaccgtacatttttattgatacagatgttcgtagtgtgggtgttttataatgcccacactttttgtttgcctgcaaaatgcattcaaaatgagttgtgaatcaattcgaagaaactatggaggtggctcattattagcaaagatcaattggttaatgagggtatccgtgcacgtgaggtccgtttaatcggacaaaatggcgaccagcttggaatcaagtcccgtcaggaagcacttgaaatcgccggccgcgcaaatcttgaccttgtgttagttgcagcgaatgcaaaaccgcctgtctgccgaatcatggactacggtaagttccgatttgagcagcagaaaaaggaaaaagaagcacgcaagaatcaaaaaatcattaacttaaaagaagttcggttaagtccgacaatcgatgagcatgactttaacacgaaattgcgcaatgcgattaaattccttgaaaaaggcgataaagtgaaagcttctatccgctttaaaggacgcgcaatcactcataaagaaatcggtcagcgtgtattagaccgtttctccgaagcatgtgctgaggttgcgacagtcgaaacaaaaccaaaaatggacggccgcagcatgttcttaatgctcgcaccgaaaaacgaaaagcaataaggaggaaatcccatgccaaaaatgaaaactcaccgcggatctgctaaacgttttaaaaagacaggttctgggaagttaaaacgttctcacgcgtacacaagtcacttattcgccaacaaatctcaaaagcaaaagcgtaagcttcgcaagagtgctgttgtaagcgcaggagacttcaaacgtatcaaacaaatgcttgctaacatcaagtaatcggataaggaacaattaggagggaaattcaatgccaagagtaaaaggcggaactgttacacgtaagcgtcgtaaaaaggttcttaaattagcaaaaggttatttcggttcaaaacatacattatacaaagtagctaaccagcaggtcatgaaatctggaaactatgctttccgtgaccgtcgtcagaaaaaacgtgatttccgtaaactttggatcactcgtatcaacgcagctgctcgcatgaacggcctttcttacagccgtttaatgcacggtcttaagctttctggtatcgaagtaaaccgtaaaatgcttgctgatcttgctgtaaacgatcttactgcattcaatcagcttgctgatgctgctaaagctcaattaaacaagtaatcatatagagccgctctccagcagagcggctttttctatataaaggatgaggcaacatgattattgctgcttatttggtgttgattaatctgtgcggtttttgggtgatgggcattgacaaacgcaaagcgcagcagcacaagtggagaatttctgaagaccggctgtggctgatagccatcgtgtttggagcgctcggtgtctggcttggcatgcaaaccttcagacataaaacgaaacacgcttcttttaagtacggagtaccgcttcttctggtaattgaagcgattctcatcgctatttactacagcccgtttgatttataaaaagcagaaaagcgtttaacgctcttctgctttttttgcgagtttaatgggctggtcccagtcaatcttacaatttggatatcgttccagcactttttcttcaatgctctcaaaatcttttgcagagaaatgcttcagcttctcaggagattctgtccagacaaagatcgtgtgaataaacagcggatgatccttggaaggaatatgcttttctccctcaaaaagcacgcctttatacgtcagcagaaaattcttccgggtattgttttgttcatcaataatataaaaatgttcttttgattgggccagcttaagccttctcttaggattcgcgacatatttgaccacggcataaatacaataagcaaaaagtgcaagcaaaataatccttagaaccatgacaaacattgtgtgaaggcacctcccttatggtgatgatctgatgtaatacgaaaagcatagaaaaaggtttcactttttctaaaagaaagctgtaaaaacatatacccgattttcaagtgaaatagtcgtatggttagcgctatgttttgtataataagaatgcaggactgatgaaggagggtttggaacatggcaaaattagatgaaacattgaccatgctgaaagatttaacagatgcaaaaggcataccgggcaatgaaagagaagtaaggcaagtgatgaaatcatacatagaaccatttgctgatgaggtgacaacagatcgcctgggcagtttaattgccaaaaaaactggtgcagaaaacggcccgaaaattatgatcgccggacatttggatgaagtcggctttatggtgacacaaatcacagataagggctttatccgttttcaaaccgttggcggctggtgggctcaggttatgcttgcccagcgggtcaccattgtcacaaaaaaaggagaaatcactggggttatcggatctaagccgcctcatattttgtctcctgaagcaagaaaaaaatcagtggaaataaaagacatgtttattgatattggagcttcaagccgggaagaagccttggagtggggggtacttccgggagatatgatcgttccgcattttgaatttacggtcatgaacaatgaaaaattcctactcgcaaaggcctgggacaaccgcatcggctgtgcaattgcaattcatgtgttaagaaacttacaaaacacagaccatccaaatatagtgtatggcgtcggaaccgtgcaggaggaagtcgggctgaggggagcgaaaacggctgcacacaccattcagcctgatattgcgtttggtgttgatgtagggatagcaggagacacgcctggcatttccgagaaggaagcgcagagcaaaatgggcaaaggcccgcagattatcgtttacgatgcatccatggtctctcacaaaggtttgcgcgatgcagttgtagccactgcggaggaagccggcattccgtaccaatttgatgccattgccggcggcggaactgattctggtgccatccatttgacggcgaatggcgttcctgcgctgtccattaccattgcaacccgctacattcatacgcacgcggccatgctgcatcgtgatgattatgaaaacgcggtaaagttaattacagaagtcattaagaagttagaccgaaaaacggttgacgaaattacgtaccaataaaagatacggaagaatccgcctattgaggcggattctatttttttgtctgtacaaattacagcatagtgactacaataaaggggataccgaaaatttcctgaacatgacgatatacgatacgcagctcgatttgacaggaagggaggataaacaatctaatttgtaagcgctttctaatataaaggaggttaaacaaaattgaaaaagaaaaaaacatggaaacgcttcttacatttttcgagtgccgctctggctgcaggtttgatattcacttctgctgctcccgcagaggcagcgttttggggtgcatccaatgagctgcttcatgacccgactatgattaaagaggggagctcatggtatgcgctcggaacagggcttactgaagaacggggactgcgggttttgaagtcttcagacgctaaaaattggaccgtacaaaaatccattttcactacaccgctatcgtggtggtccaattatgtgccgaattatggccaaaaccagtgggcgccggacatccaatactataacggcaagtactggctgtattattccgtttcttcttttggaagcaatacatctgccattggcctggcatcttcaacaagcatcagttcggggagctggaaggacgagggcttggtgattcgttcgacaagctcaaataattataacgccattgatccggagctgactttcgacaaggatggcaacccgtggcttgcattcggctcgttttggagcggcattaagctgactaagctcgataagagtacgatgaagcctacaggctcgctctattcgattgctgccagaccgaataatggcggggcgcttgaggctcctactcttacgtatcaaaatggctattactacttaatggtctcatttgataaatgctgtgacggggtaaacagtacgtacaaaattgcttacggaagatccaaaaacattacaggcccttatcttgataaaagcggaaaaagcatgcttgaaggcggaggcactattttggattcgggcaatgaccaatggaaaggacctggaggccaggatattgtgaacggaaacattcttgttcgccatgcctatgatgccaatgacaatggcattccgaagcttctcatcaatgatttgaattggagctcgggctggccgtcctattgaatcaaaaagccgggctctgcccccggctttttttaaaagaaaagattgacagtataatagtcaattactataataaaattgttcgtacaaatatttatttataggtttgttttctatcattagtacgtatcttttatatttgaaagcgttttattttatgagaaaggggcagtttacatgcttcagacaaaggattatgaattctggtttgtgacaggaagccagcacctatacggggaagagacgctggaactggtagatcagcatgctaaaagcatttgtgaggggctcagcgggatttcttccagatataaaatcactcataagcccgtcgtcacttcaccggaaaccattagagagctgttaagagaagcggagtacagtgagacatgtgctggcatcattacatggatgcacacattttcccctgcaaaaatgtggatagaaggcctttcctcttatcaaaaaccgcttatgcatttgcatacccaatataatcgcgacatcccgtggggtacgattgacatggattttatgaacagcaaccaatccgcgcatggcgatcgagagtacggttacatcaactcgagaatggggcttagccgaaaagtcattgccggctattgggatgatgaagaagtgaaaaaagaaatgtcccagtggatggatacggcggctgcattaaatgaaagcagacatattaaggttgccagatttggagataacatgcgtcatgtcgcggtaacggacggagacaaggtgggagcgcatattcaatttggctggcaggttgacggatatggcatcggggatctcgttgaagtgatggatcgcattacggacgacgaggttgacacgctttatgccgagtatgacagactatatgtgatcagtgaggaaacaaaacgtgacgaagcaaaggtagcgtccattaaagaacaggcgaaaattgaacttggcttaaccgcttttcttgagcaaggcggatacacagcgtttacgacatcgtttgaagtgctgcacggaatgaaacagctgccgggacttgccgttcagcgactgatggagaaaggctacgggtttgccggtgaaggagattggaagacagcggcccttgtacggatgatgaaaatcatggctaaaggaaaaagaacttccttcatggaagattacacgtaccattttgaaccgggaaatgaaatgattctgggctctcacatgcttgaagtgtgtccgactgtcgctttggatcagccgaaaatcgaggttcatccgctttcgattggcggcaaagaggaccctgcgcgttttgtatttaacggcatcagcggttctgccattcaagctagcattgttgatattggcgggcgtttccgccttgtgctgaatgaagtcaacggccaggaaattgaaaaagacatgccgaatttaccggttgcccgtgttctctggaagccggagccgtcattgaaaacagcagcggaggcatggattttagccggcggtgcacatcatacctgcctgtcttatgaactgacagcggagcaaatgcttgattgggcggaaatggcggggatcgaaagtgttctcatctcccgtgatacgacaattcataaactgaaacacgagttaaaatggaacgaggcgctttaccggcttcaaaagtagagggggatgtcacatggcttacacaataggggttgattttggaactttatcaggaagagcggtgctcgttcatgtccaaacaggggaggaacttgcagctgctgtaaaagaatacaggcatgctgtcattgataccgtccttccaaaaacgggtcaaaagctgccgcgcgactgggcgctgcagcaccctgctgattacctcgaagtcttggaaacaaccattccgtctttactcgaacagacgggcgttgaaccgaaagacattatcgggattggaattgatttcacggcatgtacgatccttcctattgatagcagcgggcagccgttatgcatgctgcctgaatatgaagaggagccgcacagctatgtgaagctctggaagcatcatgcggcccaaaaacatgctgatcggctcaatcaaatcgcggaagaagaaggagaggcttttttacagcggtacggaggaaaaatttcatcagaatggatgattccaaaggtcatgcaaattgccgaggaagcgcctcacatttatgaagcggctgaccggatcatcgaggctgcggactggatcgtgtaccagctgtgcggctcgctcaagcgaagcaattgtaccgcagggtataaagcgatgtggagtgaaaaagcggggtatccgtcagatgatttctttgagaaattaaacccttcaatgaaaacgattacaaaggacaaattggcaggttctattcattcggtaggagaaaaagccggcagtctgactgaaaaaatggcaaagctgacaggacttctcccgggaacggctgttgcggttgccaatgtggacgctcatgtttccgtaccggcggtcggcattacagagccagggaaaatgctgatgattatgggaacttcaacgtgccatgttcttcttggtgaagaggtacatatcgttccaggtatgtgcggcgttgtggacaacggaattctcccgggctatgcgggatatgaagccgggcagtcctgtgttggcgatcattttgactggtttgtgaaaacatgtgtcccgtcagcgtatcaagaggaagcaaaggaaaaaaacattggcgttcatgagctgctgagtgagaaagcaaaccatcaagcaccaggtgaaagcggcctgcttgctttagattggtggaatggaaaccgttcaactcttgttgatgcagatttaacagggatgctgcttggaatgacactgctgacgaagcctgaagagatttatagagcgttagttgaagcgacagcttacggaacccggatgattatcgaaacattcaaagaaagcggtgttccgattgaggaactgttcgcagccggcggaatagctgagaaaaacccgtttgtcatgcagatttatgcggatgtgacaaacatggacattaaaatctctggttcaccgcaagcaccagccttaggatctgccattttcggcgcgcttgcagcaggcaaagaaaaaggcggctacgatgacatcaaagaggcagcggcgaacatgggaaaactgaaagatataacttatacgccaaatgccgaaaacgccgcggtttatgaaaaattgtacgctgaatataaagagctggttcattatttcggaaaagaaaaccatgtcatgaagcgtctgaaaacgatcaaaaatcttcaattttcatctgccgccaaaaagaattgataaagggtgatggagcatgcttgaaacattaaaaaaggaagtgctggctgccaacctgaagcttcaagagcatcagctggtaacctttacgtggggaaatgtcagcggcattgaccgtgaaaaagaaagaattgtcatcaaacctagcggagtcgaatacagcgacctgacagccgatgacttggttgttttgaaccttgatggagaggtcgtcgaaggctcgcttaagccttcttcagatacacctacccatgtttatttatataaagcctttccgaatatcgggggaattgtccatacccattctcaatgggcgacaagctgggcgcaatcgggcagagacatccctccgttaggcacgacccatgctgattattttgacagtgcgattccatgtactcgagaaatgtacgatgaagaaatcattcatgactacgaactgaatacaggaaaagtcatagcggaaacctttcagcatcataattacgaacaggtaccgggtgtgctcgtgaataatcacggaccgttctgctggggcactgacgccttaaatgccattcataacgcagttgtattagaaacggttgccgaaatggcctatcactccattatgctgaacaaggatgtaaccccaatcaatacagtcctgcatgaaaagcatttttatcgaaaacacggagcaaatgcgtattatggccagtcatgatacgcctgtgtcaccggctggcattctaattgacttggacggtactgtattcagaggaaatgagttgatcgaaggagcaagagaagcgatcaaaacgcttaggagaatgggaaagaaaatcgtctttttaagcaaccgggggaatatctcccgtgccatgtgcagaaaaaaacttcttggcgcggggattgaaacggacgtaaacgacattgttctgtcatcaagcgtgacagcggcttttctgaaaaaacattatcgtttttcaaaggtatgggtgcttggggagcaaggcttggttgacgagctgaggctggccggtgtgcagaacgcgagcgaaccgaaggaagcggattggctcgtgatctcccttcatgaaacgctcacgtacgacgatttaaatcaagcctttcaagcggctgccggcggcgctcgtattatcgctacaaacaaagaccgctcttttccgaacgaagacggaaatgccattgatgtggctggaatgattggggcgatagaggcttccgcacaagcgaagactgaacttgttgtcggaaaaccgtcatggctgatggcggaggctgcctgtacagcaatggggctgtccgcacatgaatgcatgattataggagacagcattgaatctgacattgcgatggggaagctttatggcatgaaaagcgccttagtgctaactggttctgcgaaacagggtgaacagcgtttgtacacgccggattatgtgctggattctattaaggatgtaaccaaattggctgaggaggggattctgatatgaatcgtatcgcagctgacgttcagcgtgcttttgaaaacgccggagaaaagacgttacctataaaagttgaagaaattgttctcggtaaacaagcagctgattcgcttttggattatgtaaaacgaaaaaacaatcaacatattgtccttgtctgcgacgcgaatacacaccgcattgcaggaattgatctggaaaatcagctgaatcaagcaggatttcaggccgagtgcctgatcattccagaaaatgaagctggagatgtgacagctgatgaacgatcgctcattcatgtgctgatccatacgaaacaaacaacggatgtcatgatcgcagtcggttcgggcacgattcatgatatcgtccgctttgcagcgtttcaaagagatttgccgtttatttcttatccgactgctccatctgtagacggttttacatcagcaggggcgccgattattttatacggtacgaaaacaaccattcaaacgaaggccccgtctgcactgttcgctgatctggatctattaaaagcggcaccgcagtcaatggtggcggctggatttggtgacatgctcggtaaaataacgtctttagcagattgggaaatatcccggaatcttgccggtgagccttattcgcctgcaggagctaagattgttcaggaggcgcttgctgcctgcattgaacacacagaagacattgcgatgaaaacggaaacaggcatacgggttttgatggagtctttacttttatcggggcttgtcatgctggcattagatcattcccgcccggcatcaggcggagagcatcatatttcacattggattgagatggaattaatggagaaaaaacggccgcagattcttcatggggcaaaggtgggctgtgcagctgttttattaactgacacatacagaaagctcgctaaggatgagggattgaacgaattttcaccgagccggcggcaagccatccaatcggcttatcaaactctcccggaaggagaagtgctggctgattggctgagatcagccggaggccctgcgtattttgacgaaatcggtgtcgggcaggattctgtcaagaatgccttcagacacgcgcataccttaagagaccgctgcaccggattaagaatcattaatgaaaacaaaacactgatcaaccatggtctatatgaatagcccgcacctcgaatggaaggggtaacgcagatgaaaaaaatgactgtctgttttcttgtgctcatgatgctgctgacattagtcattgctgggtgttcagcagaaagatcatccgggaagtcgggtgaaaccgagctgaccttttggacatttaacggacttcatgagcagttctatgtagaaatggtgaaggaatggaatgaaaagcatcctgaccgcaaaattaagctgaatacggtcgtttatccgtatggacaaatgcacgataacttatctatctccctaatagcgggagaaggcgtccctgatattgccgatgtcgaattggcccgtttttcaaactttttgaagggctctgacataccgcttgccgacttgactccgctgattgaaaaggaccgtgataaattcgttgaggcgcggctgaccctgtacagcaaaaacggcaagctttacggactcgatacgcatgtaggaacaacagtcatgttttataacatggatgttatgaagaaagccggcgtcaatcctgacgatattaaaacatgggatgattaccataaagccggacagaaagtgcgcaaagtgaccgggaagccgatgggaacggtggaaacaaatgattccggaacgttcttatctatgatttcacagcaaaactcaggctattttgataaaaacggcaagctgatcctcaataatgacaccaacgtaaaaacacttcaatatttaaaagacatgatcaatgataaaacgatgattcctgcgccgggcggcgggcatcacagtgaagaatactacggctttatgaaccaaggaggagctgcttcagtcctcatgccgatttggtatatgggaagatttatcgactatatgcctgatctgaaagggaagattgccatcaggccgctcccggcatggaaagaggggggcgaccgctcggcaggcttgggcggtacggcaaccgttgtgccgaagcaatccaagcatgttgagttagcaaaagagtttttggcctttgcgaagggctctgaagaaggaaataaaaaactctggagcgtactcggctttgacccgcttcgctgggatgtttggagctccaaggaattgaaagagaaaaacaaatacacggattacttccaaaacggaacaggcattttttctgtgctgctcgatatcaaggatgaaatcaatccaatttatttacatgaggattttgccaaggcttcagaccttgtcaacagaagcgtattgttcgacgcgcttaaatctcagcaaaaaacgcctaaacaagccttggacagagcggcaggtgaactgaaacagaaatagaatcccattcaaaaagtgaaagcggggaggttctcatgaaacctgtgaaaacaggaacggttcatcccgttccttcagctgcgaaacaatcaggctggcgagatgtattttattcgaaaaaagcggcgccctatctgtttacagcgccattcgttttatcctttctcgtattttttctataccccatcattagtgtcttcatcatgagctttcaaagaatattgccgggagaggtgtcctttgtcggtttgtctaattatacagcgctaaacaacccgacgttctataccgccctttggaatacgctggaatacaccttttggacgctgatcgtgctgattcctgttccattgcttctggccatattcctgaattcaaagctggtcaaatttagaaatatatttaaatcagcattattcatcccggcattgacctccaccattgtcgcagggatcatttttcggctgatcttcggagaaatggaaacgtctctggccaattccatcctactcaaactcggcttttcacctcagaactggatgaacaatgaacataccggcatgtttttgatggtgctgcttgcttcatggagatggatgggaatcaacatcctttactttttagccggtttgcaaaatgtgccgaaagagctgtacgaagccgctgatatagacggcgcgaatacaatgaaaaaatttctgcacatcacgctgccgtttctcaagcctgtaaccgtatatgtgctgaccatcagcatcatcggcggcttcaggatgtttgaggaaagctacgtcctttggcagaataattccccgggtaatattggtctgacgcttgtcggatatttgtatcagcagggacttgcctacaacgaaatgggatacggagcggccatcggcattgtgcttttgattgtgatccttgttgtcagcctgatttcattaaagctgtcaggctcgtttaagggggagggataaatgttgcggcacagtcctcagtttagcgtttatagaattgcgctgaccctgttttttatgatgctgagcctattgtatctttttcctattttctgtttgcttttaggatcattaaagccgtcatctgagcttttgcgtgtggggctgaatcttgatattgatccaaaagtgatgagttttgataactacacatttctgtttaatggcggcagcatttatttcaaatggttttttaacagtcttgtactcggactttttacgaccgtgctcactctgtttttttcttcgatgatcgggtacgggcttgcggtttatgattttaagggaagaaatatcatctttgttcttgtgctgattattatgatggttccgctggaagtgatgatgcttcctctgtttaagcttacggtcggactgcacttgatcgattcatatacgggtgtcatattgccgtttatcgtttcacctgttgccgttttctttttcaggcaatatgctcttggccttccaagagatctgctggactccgcaaggatggacggctgtacggaattcggcatctttttcaggattatggcaccgctgatgaaaccggctttcggtgcgatgattatccttcagtccttaaacagctggaacaacttcttgtggccgctgattgtgcttcggtcgaaagaaatgtttacgcttccaatagggctgtccagcttgctgagcccttatggaaataattacgacatgcttatatccggctcagtatttgcgattttgccggtgattatcattttcttgtttttccaaaagtactttatctccggcctgacggtagggggagtcaaaggttaatgaaggaggaaacgtgtgatgaaaaaagcgcgaatgattgtagacaaagaatataaaatcggtgaagtagataaacggatttatggctcgtttatcgaacatatgggtcgtgcggtatatgaaggcatatacgagcctgatcaccctgaagcggatgaagatggatttagaaaagatgtccagtcgctgatcaaagaattacaggttcccatcatccgctatccgggcggaaactttttatccggatacaactgggaggacggtgtcggaccagtcgaaaaccgcccaagacggcttgacttggcatggcaaacgacagaaaccaatgaagtgggaacaaatgaatttttatcttgggcaaaaaaggtgaacactgaggtcaatatggccgtcaaccttggcacaaggggcatagatgccgctcgtaatctcgttgaatattgcaaccatccgaaaggctcttactggagtgatttaagaagatcgcatggctatgaacagccgtatggcatcaaaacatggtgcttaggaaacgaaatggatggaccgtggcagatcggccacaaaacagctgatgaatacggacggcttgctgcagagacagcaaaggtcatgaagtgggttgacccatcaattgaactcgttgcctgcggcagctcaaacagcggcatgccgacctttatcgattgggaagcgaaggtgcttgagcatacgtatgagcatgtcgactatatttctcttcacacttactacggaaaccgggataacaatctgccaaactacttggcccgttccatggatttggatcattttatcaaatcagtcgctgcgacctgtgactatgtaaaagcaaaaacacgcagcaagaaaacaatcaatctatctctggatgaatggaacgtatggtatcactcaaatgaggctgataaaaaagtcgaaccgtggatcactgcgcgtccgattttagaggatatttacaattttgaagatgccttattagtcggctctctgctcattacgatgctgcagcacgcagaccgtgtgaaaattgcgtgtcttgcacagcttgtcaatgtcatcgcgccgatcatgacggaaaaaggcggagaagcatggagacagccgattttctatccatacatgcatgcttctgtttatggaaggggcgagtcactgaaaccgcttatttcttctccgaagtacgactgttctgatttcactgatgtgccatatgttgatgctgctgttgtgtactctgaagaggaagaaaccctcactatttttgcggtaaacaaggctgaggatcagatggagacggagatttcgctcagaggctttgaatcctaccaaatcgcagagcacatcgtacttgagcatcaggatatcaaagcgacaaaccagcataacagaaaaaatgtcgttccgcattccaacggaacatcgtctgtcagcgaaaacggcttaactgctcatttcacgccgctttcctggaatgtgatccgcctgaaaaaacagtcataagagaagctaagccggagatttctctccggcttgtctttcaactgccacgagccggcccgttcaagccggctttttgtataggaaaaaatgaccgcttttcaccatgaaattatgatatatttatgaaaaacagcaaaggggatgggagaaaatgaatgcggttacaattgtgatagcatcaatgtgtattttggctattgcctatcgtttatacggaacatttatgatggtgaaggttctcaaagtgaatgatgacaagccaacacctgctcatgcgcttgaggatgggaaagactatgtgcctacaaataaatgggtttcgttcggccaccactttgccgcgatcgcagcggccgggccgctggtcggaccaattctggcggcgcagtttggctatttgccgggattattgtggctgttaatcggggcggtaattgggggagccgtccatgatattgtggtgttgtttgcatcgatgcgcaaaaacggaaaatcgctgtcggaagtggcaaaggatgagcttggccctgttgcaggattttgtacaggactgtccatgctgtttatcatcacgatcacaatggcgggtctgtcgatggttgtcttgcatgcgcttgaacgtaatccatggggaacatttgcggtagggattacgataccgattgcgatgggtgtgggcttattttataagaaaacgggaaatttaaagctcgcttcaacggtcggctttctctttttaatggcaggagtctttatcggtccatgggtacagactacagcgctcggtgactttttaacactagatacgaaaacgcttgcaatagcgcttcctgtttatgcgttttttgcggctgcgcttcccgtttggctgcttcttgctccgcgtgattatttaagcagctttatgaaaatcggtgtttttatcgctttgattgttggtgtgtttgtcgtcaatccgtccattccgttccctgcgtttacagaattcgtaaaaggcggcgggccggtgctggcaggacctgtctggccgttcatctcaataaccatcgcctgcggggcgatctctgggttccatgcctttgtcggctcaggaacgacaccgaaaatgctgaataaatggagtgatatgaagccggttgcgtttggcgcaatgcttgttgagtgtcttgtcggcatcatggcgctgattgcagcgaccgctttacagcctgctgattactttgcgattaacagcacgcctgaggttttccgtacgcttggcatgaatgtcgtacatttgcctgaattgagcagggaaatcggtttggacttagaaggaagaacagggggagccgtcacacttgcggtgggaatgacttatatttttaccggaatgccgtttttcagccatttggcctcatactttttccaatttgtcattatgtttgaagcggtttttattttaacagcgattgacgccggcacacgcgtcgcccgttatttgatccaggatttcttcggggaggtgtataagccgctgaagaaaacagactggattccgggctctgtatttgccagcgcgcttgcctgtttgatgtgggggtacttgctgtattcaggagatatcggttccatttgggcgctgttcggcgtttctaatcagctgatggcttcagtggggctgattatcggagcgaccatcgtgctgaaaatcgctgataaacgccgatacattctgacttgccttatcccgcttgcctatttatatgtcactgtcaattatgcgggctattggatggtgcgcaatgtgtatctcaatcctgaagcagcaggatatagtgtattgaatggcgtattatctatcatcatgctggtgttaggcttcattattatcgtggcggctgtgaaaaaatgggcgcagatgtggaaagatccgagcttaaggatggaagcgtctataccgggctagaaggactattgaaaatgttgagggggttttcaatgaatctatcaatgaaatatcttattctatacgtatcggacagcaagcgggctattcatttttaccgggatattttaggactgccgattcgtgctcaacacggcacgtatatcgaatttgatacagggtctacgatattggcgcttaatacgcgggaaagcgccagagacatcacggcgctggacattccggatacatctgcttcaaacacatttgaaatcgggtttgttactgaaaatgtagaagcggtcatcaaaaggatgagagaacaaggcgtatcgattatcggggagccaaaagtgaaaccatgggggcagacggtcgcctatatcgctgatccggatggacattatatcgaaatttgcagtccgatggaataacgcacaaaagcccaaaacagtgtctgttttgggctttctcatgatgttttgtgcccggctgcttccaatagcaaatcagccaggtgaacggctctgactttaccgcttagtccttcgcgttcaatgccgagcttcatctgcagcaggcagccgggatttgctgttacaatgaggatcgcttcggttgctttaacggcagccattttgctgtccagtattctcatagacatttcagcttcgacgatgttgtaaattcccgctgacccgcagcagctgtctgctttctccatttctttgaattccgcccctttgatgcttttaagaagctggcggggctcaagcgacgtatgcattacatttcttaggtggcatgaatcttggtaggtaacgacttgaggcgtctcgagcgctaagtccatttgatggaaatcgagttcaaccaaaacagaagaaaaatccttcagcttttgaacaaaagcggcggcccgctccgaccattccgggtcatccttcagcaaatgatcatattcggtcagaaaggctccgcatcctcctgcgtttgtaatgactgcatccacgtctaatgcttcgaaagcagcaatattttgtttcgcgagctctttccctgtgtttttttcaccgctgtgtccatgaagcgccccgcagcaagcctgttcaggcggaatgacaatgtcgcagcctgccagctgtaaaagcttcaatgtggcgttattggtcggtaaaaacattgtatccattaagcagcccgaaaaaaaggtgacccgttttttcatggggccaatggaaggcaggaaacgcgggcgatgtttcatgtctttgctttttggaatatcaggaagaacagcttccatcgtccgcaaatgctcaggcaggagccgaagcataccggttttacgcatagcggtttgcagtcctgaccgctgatacaaaccgataaggcttacagctgagcgcatgcggttttgatgcggaaacagctcgtgaaaagccgtctttcgcatgacacgttcaccaagcgagtgttttttattttggtggataatatctctggcttcttcaagcagctgcccgtatttcacgccagacgggcatacaggctcacaggcgcggcagccgaggcaaagtgacagcgaccgttcgacatcttcatccggttcaatcataccgtcggctacggctttcattaaggcgatgcgcccacgcggagagtgtgtttcctgaaatcccgattcgatataggtcggacaggaaggaagacagaagccgcagcgcatacaatttaataactctccttcatccatacgctctttaaattcattttggatctgtttcatttctttttctgttgtcatctttccgccaccacacgttttctggcatctttcgcaaacattttgccgggatttaatatgttccgggggtcaaatgccgctttcaacgctttcatcgcatcaatgccttcttttttcagcttcatttccaagtaaggcgctttcatttccccgactccgtgctctccggttatcgtgccgccaagttcaatcgctttctcaaaaatctcggcaaaagcctgttcgacacgttccatttcatcctcatttcttatgtctgtcgtgcatgtcgggtgaaggttcccgtctcctgcgtgaccaaaggtgcagatggaaatatcatatttagcagcaatatcattaatcgctttaaccatattggctatttctgagcgaggaacggtcgcatcctctaaaatcgtcgtcggtttgaggcgggctagggcagaaagtgcagaacgccgggcttcagtcagggcaaatgcttcctcctctgtttgtgcggtctgaacggaaacggcgtcaccttttttgcagatcgcctcaatcttttccatatcccgttcaacagtttcatatggcccgtcttgttcaattaacaaaactgcttttgcgcttgtcggaagtccgattttggcataatcctcaatcaccaaaagtgtaggctggtcgagaaattcaagcgtggcgggtatgatttttgcggcaatgatgtctgataccgtttgagcagcggcatcgatattttcatatagggcaagcagcgtcttttttgtttcaggctttggaacgagcttgacgattgcctctgtcacaatgccgagtgttccttctgagccgacaaaaagacgtgtgaggtcgtatccggccacatcctttgcgagttttccgccggtgcggatgatgtcaccatttgcgagcacaacctccagtccaataacatagtcgcgggtgacgccgtattttaatccgcggagcccgccggaattttcattgatgttgcccccgatagttgatattttcatagaactcgggtcaggcggataaaataaacctttgctttcaactgcccggatcatatccaacgtaatgacgcccggctgaactgtggcagttaaattttcttcatcaatctcaagaatctggttcatgtgcttaaagagaagcacaagtccgccttcagtcgggcacgtgccgccgcacaggtttgtccctgatcctcttggaacgatcggcactcgatgttcgctgcaaattgttaaaatgcgtgatacttcttcagtattcctcggagcaatcacggcatcaggcatagactgatactgaggcgtcgcatcatatgaatagacgagacggccggcattcgagtcatcaaagttttctggtccggagacccgaatcagctgctcctttacatccttggtgatcatttcacccatccccctgtcaaaaaaaactttcaatctattgtaaaagaaaaaaagcaaagccttccatggagaaacatacaaaaaatgaaactgaaactctctctattttgtatcttgatctaaaaaatagagggcaacgtacatcgtgacgatgtcctcggtacggtcaaaacgtaaacccgtcagctgttcagccttagccagacgataacgcaatgtattgatatgaatatgcatatcttctgcggtttgtttcaaagacaaatcgtgatgaaagaaagtccgtaacgtattcataagttcctgatgctcaagcgcctctcctaatactctttgcggaaattcgtttcgggttcccgggctgatctccgtcagacacatatcaagcttcagatcctcttcaaatatgggcgtttttcgcttaaggctgacagccagcgctttttccgcttgctcgtatgaatctgtcaggctggagcttgcgacagcccttccggcgccagctgctgtatattggctgcttgcggtattggcaaacgaacaaatgtgaaggattttccgtaaaagccgatccctttgttcatgctgcggcacttcatgattaatcaaaatccgttcatttccccacctgatgaacaaatccgcagggtacgaggatttccagctgcgtgccatttgttcaatatcatgaggtgaccactcatacccctgaataagaatcatttggcgccgggaagaaaggtcaacaccaagaagctgagctttctcaagaaaactgggagaccactcctttaattgcagccaatcgatcataaaggactccagcattctctcacgccactgggattgctctaagtgccgcgattccttaatgaacagttctgtcatttttcgaagcagttctccgaatggctgaatctctgcaggctcacctgtcagcccgaagacggcaatcacatcatggtcaaaaaataaagggaggtttatgcctgctttcactccttttaaccttgtttcatcttcttttgtaataatcacgctgcgtctttcttttgcgcagataagcgctccctcatgaaattgtccgacacgctcatcgtttgtgcctgccataataagaccgtccgtgtttacaataatgacttcacgttcgtacatttttttaacttcagcaataatttttttcgctaataacggctgtaaaaacatggcgttccccctcatcatgtttttattatataagaaaaaaaccgggcgctgtcacccggtttcatgtcttattcggcgggttttaatccgccttcaagcgttttcagcatttcgtttttctcactttcggatgcgtgctgccaaatgacttcgaataaaacgccgagccctggaagcattttttcttcaccgctttgaatcgcatctacgattgtatgctcaagctgctcctgattattgccggtgacattggcaatgacggcatgacgtaaattaagatccatgtaaaacgctcctttttctaaaatgtaatacgtatattctaaccctgcacctggtttattatgtgctgttcttgcgatataataacatcatgttaaaaaaaggagcgccacatagacagtgaaacaaatagaatcggcaaaaaaccaaaaagtgaaggattggaaaaagcttcacacaaaaaaagaacgaacaaaaacaaatacatttctgatagagggagaacacctcgttgaagaggcgttgaaaagcccgggcattgtgaaagaaatccttgtaaaggatgaaacgaggattccttcagatcttgagactggtatccagtgctatatgctgagtgaagatgcgttttcagctgtgactgaaaccgaaacgccgcagcagattgccgctgtgtgccatatgcctgaagaaaagctggcaacggcacgcaaggtgctgctgattgacgctgttcaagatccgggaaaccttggcacaatgattcgaacggctgatgcggccggtttggatgcggttgtactcggtgacggcacggcggacgcctttaacggaaaaacactgcgatctgctcaaggatctcacttccatattcctgttgtgagaagaaacctgccttcatatgtggacgaattgaaggcagagggcgtaaaagtatacggcacggcgctgcaaaacggagcgccttaccaggagattcctcagtctgaatcctttgcgctcattgtaggaaatgaaggtgcaggggtggatgctgcattgctggaaaaaacggatttgaacctgtacgtgccgctttacggacaggctgaatcactaaacgttgcggttgcggctgccatcctcgtgtatcacttgcgaggatagtgttgcgccaagcgttggatttctctataatagaacataatatttcaaaaaccgtgacagaggacctcaatttctgatcaactgctttccagggagaaaatgccgctgactgagagcatttttaacgcagccggaaattggcttcacctcttgagttgtcgccgggaccgcgtacactgcgcgtaaaggtgaaccggaatctgattccgttatgtcaatgaagctgacgacagcatcagtctgtctgaaataagggtggtaccgcggccacaactcgtcccttgtacaagggacgggttttttttattttccaaagacatatgacggtttgtttacataaaaggaggatgcaaaatggaagaaaagctaaaacagctggaacaagaagctttagaacaagtagaagcggcaagctcattgaaggttgtcaatgatattcgggtgcaatatctcggaaaaaaagggccgattacagaagtgctgcgcggaatgggcaagctttctgctgaggaacgtccaaaaatgggggcgctcgcgaacgaagtaagggagcgtattgccaatgcgattgctgacaaaaacgagaagcttgaagaagaggaaatgaaacagaagcttgcaggacagacaattgacgtcacgctgccggggaaccctgttgcagtcggcggccgccatccgctcactgttgtcattgaagaaattgaagatttatttatcggtatgggctacacagtcgaggaagggccagaggttgaaacggattactacaacttcgaatcgctcaatcttccgaaagaacaccctgcgcgcgatatgcaggacagcttttacatcacagaggaaactttgatgagaacgcaaacttctcctgtccaaacacggacgatggaaaagcataaaggcaaaggtcccgttaaaatcatttgcccgggtaaagtatatcgccgtgataacgatgatgcgacgcactctcaccaatttatgcaaattgaagggcttgtcgttgacaaaaacatcagcatgagtgatttaaaaggaacgcttgaactcgttgcgaaaaaaatgttcgggcaagaccgtgaaatcagactccgcccaagcttcttcccgtttactgagccttcagtagaagtggatgtgacatgctttaaatgcggtggaaacggctgctcagtatgtaaaggaacaggctggatcgaaatcctcggcgccggcatggttcacccgaatgtgcttaaaatggctggctttgacccgaaggaatatcagggcttcgcattcggaatgggtgttgagcgcatcgcgatgctgaaatacggcattgatgatatccgccacttctatacaaacgatgtcagatttatttcgcagtttaaacaggcgtaagaggaggatgcaaggatgtttgtttcttataaatggttagaggattatgttgatttaaaaggcatggacccggctgttcttgctgaaaaaattacaagagccggtattgaggttgaaggaattgaatacaaaggagaaggcatcaaaggcgttgtcatcggccatgtgctggagcgcgagcagcacccgaatgctgataagctgaataagtgccttgtggatattggagctgaagcccctgtacaaatcatttgcggcgcgccgaatgtggataagggacaaaaagtcgcagttgcaacagtcggagcggtgctgccgggcaatttcaaaatcaaaaaagctaagcttcgcggtgaagaatcaaacggcatgatctgttccttacaggagcttggtattgaaagcaaacttgtggcgaaggagtatgcagaaggcattttcgtattcccgaatgacgctgaaacaggaagcgatgccttagcggctttacagcttgacgatgcgattcttgagctgggtttaacgccaaaccgcgcggatgccatgaacatgcttggtgttgcttacgaggttgccgcgattttagatactgaagtaaagcttccgcaaacggattacccggctgcttcagaacaagcgtctgattacatttcagtcaaaattgaagatcaagaagcgaacccgctgtacactgcaaaaatcattaaaaatgtcacgattgctccgtcaccgctttggatgcagacaaaactgatgaatgcaggcattcgtccgcacaacaacgtcgttgacatcacaaattttgtcctgttggaatacggacagccgcttcatgcatttgattatgacagatttggctctaaggaagtcgtagtaagaaaagcagctgagaatgaaatgatcgtcactcttgatgatcaagaacgtaagctgtccgccgatcaccttgttattacaaacggaatgaaagcgcaggccgttgcgggtgtcatgggaggagcagagtcagaggttcaggaagatacgaaaacgattttgcttgaggctgcgtatttcaacgggcagacggttcgcaaggcttccaaagaccttggtttgagaagtgactcaagcgtaagatttgaaaaaggaattgatccggcgcgcgtacgtcttgcagcagaacgggctgcgcagctgatccatctgtatgccggcggtgaggtgcttgcaggaacagttgaggaagatcacctgacaatcgaagcaaataacattcacgtatctgctgacaaagtgagcagcgttctaggcctgacgatcagtaaagaagaactgatcagcatttataaacgtctcggttttacggtcggtgaagcgggtgaacttctcgttgtgactgtcccatcacgccgcggcgacattacaatagaagaggatttaatcgaagaagcggcaagactgtacggctacgataacattccgtctacgcttcctgagacagcgggaactacaggcggattaacgccataccaggcaaaacgccgtaaagtcagacgcttccttgaaggcgcaggcttatcacaagccatcacttactcactgacaaacgagaagaaagcggcagcgtttgcgattgaaaagtcattgaatactgtgcttgcgcttccaatgagtgaagaaagaagcattctcagacacagtcttgttccgaatctgcttgattctgtttcttacaacctcgcgaggcagactgactcagttgcactgtacgaagtcggctccgttttcctgacgaaggaagaggacacaaaacctgttgaaacagaacgcgtagcaggagctgttaccggattatggcgcaagcagctatggcagggtgaaaagaaaccagttgatttctttgttgtcaaaggaattgtagaagggctgttagacaaactcaacgtcctagacagcattgaatttgtacagtctgaacgcaaacagctgcatccgggcagaacagcgaacattttattgaatggttctctgatcggcttcatcggccaagtccacccttcattggaaaaagaactggatataaaggaaacatacgtatttgagctcgatcttcatgcgttgctcgcagcagaaacagcaccgcttgtttacacggcgattccgaaatatccgtctgtgacacgtgatatcgcccttgtaacagataaaaccgttacaagcggacagctcgagagcgtcattaaagaggctggcggcaagcttctgaaagaggtaaccgtctttgacgtatacgaaggcgaacatatggaggaaggcaagaagtcagtcgctttctcactccagtatgtcaaccctgaacaaacactgactgaagaagaagtgacaaaggcgcacagcaaagtgctgaaagcgttagaagacacatatcaagctgttttaagaggctgagaaaaaagcttgcagagaaatctgcaagcttttttctatgaacgttttttatcagcaaggcgctgcgctttttgcgtattggcgaaatggagttttgtaaaggttctgagtgcagatgccccttttttgaggatcagcttggcggccgcttcatcgacgtgcggaccggccccttttggaagcgtcattcctgccgcgcgtgatagtttatccatttccattaaaaatgaatatcttgcaatgattgaagcagcggcgacagccaggtgaataccttcagcttttgtgctaaaataggtccgctccttcacaatgtctctgccctttaaatgattgaagtagacgcctggctcagcgaattggtcaatcaaaatggcctcaggctttattccatccattttccttaataaatgggtgatcgcctgattgtgcagcaatgctttcattttcccttggctcatgcctttttcctgcatgctgttatacttttcattttttaaaaccagcaggctgtatggaatagttttgatcaggtttcgggcaatctcgatgatttgcggatcttttaaatctttagaatccttaacaccgagttccttcattaaaggaagcatggttttgtcgacgtacgcgcatacaaccgtcattgggccaaagtaatctccggttccgacttcgtcagaaccgataacagacattccggcgatatctgccggaggggcatagcggggatcagccggctttttggccattttcttcttttccggctctgctgttccccagcgcgcggattctgccgctgcgtttttgccttgaaataagaccttgccggattgatatgctgtaatggtacagccgggcggtttcgcctgaaaaacggctccctgcggaacagaggctgtaagcgaaccgctgtatgtcattttcatttggtcaatagcagacaacgatacttttatcactgaatgggacacgtaataatctcctttttttacacttttcgctgtatataccagtgtatcataacagcgggaggctcgtctttccattcatttaataaacgtgttatgataagaactaggattctcgcggaatggaggagaaacgttgtctgacggcaaaaaaacaaaaacaaccgttgacatttacggccagcacttcacgattgtcggtgaagaaagcagagcccatatgaggtatgtcgccggaattgttgatgataaaatgagagaaatcaatgaaaaaaatccataccttgatataaataaacttgcagtgctgacagcggtaaatgtggtgcacgattatgtcaaattacaagagaaatgtgaaaaactggagcggcagcttaaagaaaaggattgaacaactatgctagatatcatcatcttaatcttgctcctgatggggactttactggggttaaaacgcggttttatcctgcagtttatccgcttgacgagctttattttatcaattgcctttgcggctttattctataaaaacgtggcaccgcatttacattggattcccgcacccgatttttcagcgggacagccggctctttctttttttacggggaatttggaagcagcgtactataatgcgattgcgtttatcgttttatttatcattgctaaaatcttactgagaatcatcggctcgttcttgagtattgtcgccggcattccggtgatcaaacaaatcaaccaattgctgggcgccgttctcggttttctagaagtctatttatttacatttgtgctgctgtatgtcgcatccgttctgccggtagatgcactgcagcaaatgatggggcaatcgtccctcgcaaatgtgatcattaaccatacaccatacttgtcagggctcctacaagagctgtggacacagtacggggcataaaaaaacttctcttgtccggagaagtttttttcaagtatgatggaaacatatgtgaacgtctgggggttatgatatgcataaaaaagatattatccggctgcttgaaaccattgcagtctatatggaactaaaaggggacaacccgtttaaagtatccgcctttcgaaaagcggcggcagccctggaacaggacgaccgaagcttatcagaaatggacgatatgatgtcgctgtccggcattggaaaaggaacgtacagcgtcattaaagagtatatagatgaaggaaagtcaagcacgctcgaatcgcttcagaaagaagtgccggaaggactcgtgcctttattgaagctgccggggctcggcggcaaaaaaatcgcaaagctatataaagagctcggcgtacatgatgcagaatctctgaaggaagcctgtgaacagcaaaaggtacaaggtcttgcgggcttcggcaaaaaatcggaagaaaaaatattacaggcgctcggggaagccggaaaacagcctgaacggttcccgatcggctacgccctccggatcgcgcgggaaattgaggagcatctttctcaatttacgcatatcatcaaattttctcgtgccggaagtctccgcagagcgcgggaaacggtgaaggatctggattatatcattgctacagatcatccggctgaagtaagagagcagcttcttgagctgccaaacatcaaaagcgtgatcgcaagcggagatacgaaggtgtccgtcatcctttcctttgaatatgaaacaagcgtcgatttccgtcttgtgacggaagagcagtttccgacaacactccatcattttacgggatcaaaggatcacaatattaaaatgcgccaaatcgccaaagaacgcggcgagcggatcagtgaatacggcgttgagacagttgaaaccggagagatcaaaacatttccgagtgaacgtgaattttatgcgcacttcggcctgccgctgattccgccggaaattcgtgaaagcggacaggaagtggaaacctacagcgacagcattgaactgatagaacccgggcaaatcaaaggtgatctccacatgcactcaacgtggagcgatggtgcattttcgatcagagagatggctgaagcctgcatcaaaaaaggctatcaatacatggcgatcaccgatcattcacaatatttaaaggtcgccaacggccttactgcagaaagacttaagcagcaggcaaaagaaattgacgcactgaatgcagagtttgaaaacttccgtattttgaaaggcgttgagatggatatcctgcctgacggtacgctcgattatgatgacgatatgcttgcggaaatggatatcgttattgcatcgattcattccagttttaatcagccggaacacgtgattatgaaacggcttgagacggcactgacaaacaagcatgttgacattatcgcacacccgaccgggcgccttatcggcagacgggccggttacgaaatcgatattgatcagctgattgagcttgcgaggaaaacaaatacggcgcttgaacttaacgccaaccctgcgcgccttgatctgcgcacagagcatttaatgaaagcaaacgaacaaggggttacattggtgattaatactgatgcccataatattgagatgttagacgatatgaaaactggcgttactgccgcgcgcaaaggatggacggaaacgaaaaacgttctgaatgcccggtcgcttaaagacgtagaggtatttctgaagcgcaacgattaagtaaggaggctcacacaatcgtgcagcaaaaagtattatcagctcttgaatttcataaagtgaaagaacaggttattgggcatgccgcttcatcgctcggaaaagaaatgcttctcgagcttaagccttctgcttctatagacgaaatcaaaaaacagctggatgaagtagacgaagcttctgacattattcggctgagaggccaagcgccatttggcggccttgtagatatcagaggagcgttaagacgggcggaaatcggcagcgttctcagtccttctgaattcactgaaatctcaggcctgctttatgcagttaaacaaatgaaacattttatcacccaaatggctgaagacggtgtcgacattccgctgatccatcagcatgctgaacagcttatcacgctgtccgatttagagcgggacattaattcctgcatcgatgatcacggagaagtgcttgatcatgcatcggaaacattaagaggaatccgcacacagctcagaacactcgaatcaagagtcagagaccggttagagtcgatgctgcgttcctcttccgcatcgaaaatgctgtctgatacgattgttacgattcggaatgaccgctttgtgatcccggtcaaacaggagtacagatccagctatggaggaattgtgcacgacacctcatcctctggtgcgacactattcattgaaccgcaggcgattgtagatatgaacaattcccttcaacaggcgaaagtgaaagaaaagcaagaaattgaacggattttgcgtgtgctgacagagaaaacggcagagtatacagaggagctatttctagatttgcaagtgctgcagacacttgactttatttttgcaaaagctagatatgcaaaagcagttaaagcgacaaaaccgattatgaacgataccggctttatccgtttgaaaaaagcccgccatccattgcttccgcctgaccaggttgttgccaatgacatcgagcttggccgcgatttttcaaccattgtcatcacagggccaaacacaggggggaaaacagtcacccttaaaacgttaggcctgctaaccttaatggcgcaatcaggtcttcatatcccggcagatgaagggtcagaagcggcagtatttgagcacgtattcgctgatatcggtgatgaacagtcgattgagcaaagtttaagtacgttctcatcccatatggtgaacattgtcggcattttagaacaggtcaatgaaaacagccttgtgcttttcgatgaacttggtgcagggacagacccgcaggagggggcggccctcgccatgagcatcttggatgacgtgcatcgcaccaatgcacgagtgttagctacgacgcattatccggaattgaaggcgtacggctataacagagaaggcgtcatgaatgccagcgttgaatttgacatcgaaacgctgtcaccgacctataaacttttaattggtgtgccgggtcgaagcaatgctttcgaaatttcaaaacgcctcgggcttccggaccatatcatcgggcaggcgaagtcagaaatgacggccgagcataacgaagtcgatacgatgattgcgtcgctggaacaaagcaaaaaacgtgcggaagaagagctttctgagacagaatcaatcagaaaagaagcggaaaaactgcataaagagctgcagcagcaaatcatcgagcttaacagcaaaaaagacaaaatgcttgaagaggcagaacagcaggctgctgaaaaagtaaaagcggcaatgaaagaagccgaggacattattcatgaattgcgcaccataaaagaagaacacaaatccttcaaggatcacgagctgattaacgcgaagaaacggttagaaggcgctatgccggcttttgaaaagtccaagaaaccggaaaaaccgaaagcgcaaaaacgcgactttaagcctggcgacgaggtgaaagtcctcactttcgggcaaaaaggaacattgctcgaaaaaacaggcggcaatgaatggaatgttcaaatcggtattttaaagatgaaagtaaaagaaaaagatctggagtttatcaaatcagctccggagcaaaaaaaagaaaaaatcattacagcggtcaagggaaaggactatcacgtatcgcttgaacttgatctccgcggcgaacgctatgaaaatgccctcagccgggttgaaaaatacttggatgatgcggtgttagccggatatccaagagtgtcaatcatccacggaaaaggaaccggcgctttaagaaaaggcgtacaggatcttctgaaaaaccaccgcagcgtcaaaagttcccgtttcggtgaagcaggtgagggaggatcaggcgttacggttgttgaactaaaataaaagggagtatggccatgagtgatttttgggaaaacgagcttgtggaaatcgcggcatattacagtgtcgcggttctctgcctcgtcctctttttgactgtgtttgagctggtgacggcttataaaaactgggaagagattcaaaaaggaaatcttgcggtggcaatggcgaccggcggaaaaattttgggaatcgcaaacgtatttcagcattccatctcccagcataattcgctgctgcaaatgatcggctggggcgtttacgggtttgttatgcttctgatcagctactttatttttgagtttttgactccgcggtttaaaattgatcaggaaatcgaaaatgataaccgggctgtcggctttatttcatttgtcatttctgtcgggctttcatttgtggtggcagccggaatataaggggacggagaatagatggaaaagcttgcgaaaatactgctcgccgcggcgggaatctttttgttaattggtcttatatatctgttcatattatgagaaaaagaaagatttacctttctttttcttttttttgccgtccatctgctataatgataaggtggatctctaaaatcgaaaggggaggttttatgcagtctcaaaagccgtggcttgccgagtatcccaacgatatcccgcatgagcttccgttgccgaataaaaccctgcaatccatcctgacagactccgccgcacgattccctgataaaaccgcaatatcgttttatggaaaaaaactcacctttcatgacattctgacggatgctcttaaacttgcagcttttttgcaggtcaatggcctgcaaaaaggagacagagtggctgttatgctgcccaattgcccgcaaacagtgatttcttattatggcgtcttgtttgccggtggcatcgtggtgcagacgaatccgctttataccgagcatgagcttgaataccagcttagagatgctcaggtaagtgtaatcatcaccttagatttgcttttcccgaaggcgataaaaatgaaaacgttatcaatagtcgaccagattttgataaccagcgtaaaagactatttgccttttccgaagaatattctttacccgctgacgcaaaaacaaaaagtgcatatcgactttgacaaaacagctaacattcacacgttcgcttccagtatgaagcaggaaaaaactgaactcctgacaatcccgaagatcgatcctgagcatgatatcgctgtcctccagtataccggaggaacaaccggagctccaaaaggggtcatgctcacgcaccaaaatattttggcaaatactgaaatgtgcgccgcttggatgtatgacgtgaaagaaggcgctgaaaaagtgctgggcatcgtcccgttttttcatgtctacggactgacggcagtcatgaactattcgattaaactaggcttcgaaatgattcttcttcctaagtttgatccgctcgaaacacttaaaatcatcgacaaacacaaaccgacgctctttcctggcgcaccgacaatttacattggccttttgcatcaccccgaattgcagcattatgatctgtcatccattaaaagctgtcttagcggatcagccgcgctccctgtggaggtaaagcagaaatttgaaaaggtgactggcggaaagcttgtggaaggctatggtttgtctgaggcatccccagtgacgcacgccaattttatctggggaaaaaacaagccgggcagtatcggctgtccttggccaagtacggacgctgcgatctattctgaagagacgggtgagcttgccgctccgtatgagcatggagaaatcattgtaaaaggtccgcaagtcatgaaaggatactggaataaaccagaggaaaccgccgcagtgctgagagatggctggctgttcaccggggacatgggctatatggatgaagaaggctttttctatattgctgacaggaagaaggatatcatcattgccggcggttacaatatttacccgcgtgaggtagaagaagcgctttatgaacatgaagccatccaggaaattgttgtcgcaggcgttcccgattcctacaggggagaaacagtaaaagcatttgtcgtattaaagaaaggcgcaaaagccgatgcagaagaactggacacttttgcaagatcacgtctagctccctataaggtgcccaaagcctatgagttcagaaaagagctgccgaaaacggcggtgggaaaaattttaagaaggcgtttacttgaagaagaaaccgaaaatcatcatatcaaataaaaaaagagaacgtccatgaataaacttgacaaacctgaaaatccttcttatcataaaattatgaatgaatagtcattcatttctataggaaggaacgatgaacattgaagcaaaaacggccaaagtatatgcagattattgatgcagcagtagaagtcattgcagaaaacggctaccaccagtcacaggtatccaaaattgccaaacaagccggagtagcggacggcaccatctatctctattttaaaaacaaagaagatattttaatttctctattcaaagaaaaaatgggtcaatttattgagcggatggaagaggacattaaagaaaaagcaacagcgaaagagaaattggcgcttgtgatttcaaagcatttttcccttttagcgggtgaccataatctcgcaattgtcacgcagcttgagctccgccaatccaacttggagctgcgccaaaaaatcaacgaaatattaaaaggctacttaaatattttggatggcattttgacggaaggcatacaatcaggcgaattaaaagaaggcctcgacgtccgcctcgcccggcagatgatttttggaacgattgacgaaaccgtgacaacatgggtgatgaatgaccaaaagtacgatcttgctgcgctttcagacagcgttttagaattattggtgtccggaattcataataagtaaaggagttctgtcctatgaatgcaatatcactggcagttgatcaatttgtggcagttttgacgattcacaatccgccggcaaatgcgctttccagccggatattagaagagctgtcttcctgtcttgatcaatgtgagacagatgcaggcgttcgaagcattatcattcacggcgagggaagatttttctcagccggcgctgatattaaagaatttacatcgcttaaaggcaatgaggattcctcattgctcgctgagcgcggccagcagttaatggagagaatcgaaagctttccaaaaccgattatcgcagcgattcacggcgctgctctcggaggcgggctggagcttgcgatggcctgtcatatcagaatcgcaacagaagatgctaagctggggctcccggagcttaatctcggtatcattccaggttttgcggggacacagcgccttccgagatatgtcggtacagccaaagcattagagctcatcggatcaggagaaccgatatccggaaaagaagcgcttgatctcggacttgtctcaattggagcgaaagatgaggcagaagtgattgaaaaagcaaaagcacttgccgctaagtttgcagagaaaagcccgcaaacgctggcatctttgcttgagcttctttattccaacaaggtgtattcctatgaaggcagcttaaagcttgaagcaaagcgatttggggaagcatttgagtcagaggacgccaaggaaggcatccaggcatttctcgaaaaaagaaagcctcagttcaaaggcgaataaaaggggatatgatcatgaatctatttgtactgatgaaacggacgtttgacacagaagaaaaaatcgtcattgaaacaggaaagattcaggatgacggagcggaatggatcattaatccatatgatgagtacgcgatagaagaagccatccagttgaaggaaaagcatggcggcacgatcaccgctgtcacggtcggcggtgaagaagcggagaaagaattgcgtacggcgcttgccatgggttgtgaccaagctgttttaatcaacatagaagatgatcttgaagaacccgaccaatattccatttctcaagttttataccactatttgaagaatcaggagtttgatttgattctcggcggaaatgttgccattgacggaggatcaggacaagtggcgcctcggcttgccgagctactggacattccgtgtatcactacgatcaccaaactcgaaatcaacggcactgatgcagaagcagaaagggacgtcgaaggggatgttgaaaaaatcaaaacgacgctcccattgcttgtcacagctcagcagggcttaaacgagccgcgctatccatcgcttccgggaattatgaaggctaagaaaaagccgcttgaagagcttgaacttgatgatcttgacctggacgaagaggatgctgaaccaaagctgaaaaccattgaacgttttctgccgccgaaaaaagaagccgggaagcttctccaaggtgagcctgctgaacaggcaaaagagcttgtttcattgctccgcagcgaagctaaagtcatttaaagcttggacattcaaagaaacagggggatgttagaatgggaaaaaaagtgatcgtgcttggagaaatacgcgatggggaattgcggaatgtcacctttgaagcaatagctgcaggaagaaccatttcaggagatggggaagtcatcggtgttctcatcggtgaaaatgtacaaagcattgcacaagagcttattcattacggagcagataaagttcttaccgctgaggacccgaagctgaaaacatacacggcagacgggtacagccaggtcatgagaggtgttatcgagcaagaaaatcctgattcagtcatcttcgggcatacggcaatgggcaaggatctttcaccgaagcttgctgcccggctgcaaacaggcttaatttctgatgctatagatgtaagcgttaccggaggaaatgttgtgttcacacggccgatttactcggggaaagcttttgaacgcgtcatttcaaccgatccgatgatctttgcaacaattcgccccaataacattcaagcttcagaaaaagacaccagcagatcgggaagcatcgaaagcataaatgtctctcttactgaccttcgcaccgtggttcaagaggtcgtcaaaaaaacggcggacggtgttgatctctccgaagcgaaaattatcgttgcgggcggccgaggagtcaaaagcatggaaggatttcagccgctgcaggagcttgcagaggtgctaggggccgcagtcggggcttctcgcggggcatgtgacgctgattattgcgattacgctctccaaatcgggcagaccgggaaagtcgtcactccggatttgtacattgcatgcggcatttccggcgccatccagcatttggccggcatgtcaaacagcaaggtgatcgtcgccatcaataaagatcctgaagccgatatctttaaaatagcggattacggcatcgtcggtgatttatttgaagttgtcccgttattaactgaggaattcaaacaattgaatatacactcataaaggaaatcccggactttaaaagttcgggattttttcatatttataaatacatacgtacaaatataaaaccaatagaaaatgtggttgacatgtacgaacatatataatatggttactttaaaagcgcttacattcatgctgactcctcaggcaaaaagacagatcacatatttgactgtggtgcttttcatatccgtatgaaaggaatgatcagaggcatgtctgaacatcaagcagtgattcaaacagatatcgtaaaaggaaccattaacaaaaatatatacggtcattttgctgagcatttaggaagagggatttatgaggggatctgggtcggaacggactcagacatccccaatatcaacgggatacgaaaggacgtgctggaggcgctcaaacagctgcacattcctgtcctcaggtggccgggcgggtgttttgcggacgaataccattgggcaaacggtgtcggtgaccgtaagacaatgctgaacactcactggggcggtacaattgaatcaaatgaattcggaacgcatgaatttatgatgctttgcgagctgcttgaatgcgagccatatatttgcggcaatgtcggaagcggaaccgttcaggaaatggcggagtggattgagtatatgacatttgaagaaggcacgccgatgtcagactggagaaagcaaaatggaagagaagaaccttggaagctgaaatatttcggcgtgggcaatgaaaactggggctgcggcggcaacatgcatcccgaatactacgcagatctgtaccggcgttttcagacttatgtccgcaattacagcgggaatgacatttataaaattgcaggcggcgcaaatgtggatgattttaattggacggacgtgcttatgaaaaaagccgctggcctgatggacgggttgagtcttcattattacacgattccgggggatttttggaagggcaaaggatcagccacagaattcacggaagatgaatggtttattacgatgaaaaaagccaaatacatcgatgaattgattcaaaaacacggcacgattatggaccggtacgatccggagcagcgggtcgggctgattattgatgaatggggcacgtggtttgatcccgagccaggcacgaatcccggtttcttatatcagcaaaacaccattcgtgatgcactggtggcggcttctcatttccacattttccatcagcattgccgccgggtgcaaatggccaacatcgcccaaacagtaaatgttctgcaagcgatgattttgactgagggagagcggatgcttttgacaccgacgtaccatgtatttaatatgtttaaggtgcatcaggacgcttctcttttagccacagagacaatgtctgccgactatgaatggaacggtgaaacgcttccgcaaatcagcatttcagcgtcgaaacaagctgaaggcgatatcaatatcacaatttgcaacatcgatcaccaaaacaaagcggaggcggaaatcgagctgagaggcctacacaaggcagcggaccattccggagtcattcttacggcagaaaaaatgaatgcgcataacacgtttgacgatcctcatcatgtcaaaccggaatccttcaggcaatacacgctcagcaaaaacaaactgaaagtaaaactcccgccaatgtcagtcgtcttacttacgctgcgtgctgattcttaatcgcgcaagagcgccggagcttcatgccggcgctctttttcaggttttaaaacagctccggcagggcatggtaaagtacatgacagtgaagaggagatgtgatcttatgcttcgtaccattttaatgattattggggcaattgtagtgatcggggccattatcagatttgtgttttaaaaaaagagcatatcccattcaaccatataaaaatgagtaaaccggctgtgatcaggaaaaaataatttgtaagcattaaaatagcgtgaacgaatgggagatgctatactaaaaatcatcatttcacattggaggaattcaataatggctatcgtaaaagcaactgatcaatctttctcagctgaaacaagcgaaggcgtcgtactggcagacttctgggctccttggtgcggaccttgtaaaatgattgcacctgttcttgaagaattggatcaagaaatgggagacaaactgaaaatcgtaaaaatcgatgtagacgaaaaccaagaaactgccggaaaatacggcgttatgagcatcccgactcttcttgtgttaaaagacggcgaagtagttgaaacttcagtcggcttcaaaccaaaagaagcgcttcaagagcttgtaaacaaacatctttaattttccgctgcttacatgccagagcgattccgattgagggatcgctttttttattcgccaattgtgaaccatagagaaaaacaaacgttcgtgttaaactggaaataaaggattaaacataaggaagggtaacatatgaacaaacaactgaaagaaaaactcgccctccttcctgatcaaccgggttgttatctcatgaaggaccggcagcagactgtgatctacgtagggaaagcaaaagtgctgaaaaacagagtgcgctcctacttcaccggttctcacgacgcgaaaacccaaaggcttgtgacggaaatcgaggattttgaatatatcgtgacgtcctccaatcttgaagcgcttattttagaaatgaatctgatcaaaaagcatgatccgaaatacaacgtcatgctcaaagacgacaaaacctatcctttcataaaactcacccatgaacgccacccaaggctgattgtcacccgcaatgtcaaaaaagacaaagggcgctatttcgggccgtatccgaatgtacaggcagcaagggaaacaaaaaaactgctcgaccgtctgtatcctctcagaaaatgctccaagctcccggacagagtgtgcctttactatcatctgggccaatgcctcgctccgtgcgtaaaggatatttccgaagagacgaacagagagctggttgaaagcattacacgtttcttaaggggcggctataatgaggtcaaaaaagagcttgaagagaaaatgcatgaagctgctgagaatcttgagtttgaacgagcaaaagagcttcgtgaccaaattgcccatattgaatcaacgatggaaaaacaaaaaatgacgatgaacgatctagtcgaccgtgatgtattcgcgtacgcgtacgataagggctggatgtgcgtgcaggtctttttcatccgccaaggaaagctcattgaacgcgatgtcagcatgttcccgctttatcaggaagcagatgaagagttcctcacgttcatcgggcagttctattcaaaaaacaaccacttccttccgaaggaggttttagttccggacagcgtagatcaatccatgatcgagcagctgctggaaacaaacgttcaccagccgaagaaaggcccgaaaaaagaactgctcatgcttgcccataaaaatgcgaaaatcgcattgaaagaaaaattctctttaatcgaacgcgacgaggagcgttcaatcggggctgtgcagaaactaggtgaggcattaaatatttatacgccgcacagaattgaagcgtttgataactcaaacatacaggggacaaacccggtttccgcgatgattgtgtttatcgacggcaaaccatacaaaaaggaataccgcaaatataaaatcaaaaccgttacagggccggatgattacggttctatgagagaggttgtcagaagacgctatacgagagtgcttcgtgagaatctgccgctgcccgatctgatcatcattgacggaggaaaagggcagatcaacgcagcaagggatgtcattgaaaatgaactcggcttggatatcccgatcgccggtttagcgaaagatgaaaaacacagaacctcaaatttactgatcggtgagccgctggaggtggtgtatctggaacgaaacagccaggaattttacctcctgcagcgcattcaggacgaggtgcaccgttttgcaatcagttttcacaggcaaatccgcggaaaaagcgcgtttcaatccgttttggacgacatcccgggtatcggagagaaaagaaagaaaatgctgttaaagcatttcggttccgttaaaaaaatgaaggaagcaagccttgaggacatcaaaaaagccggtgttcctgcagcggcggctcagctcctttacgacaaattgcaaaaataatgttgtccttttaaataagatctgataaaatgtgaactaatttcatagttagatcgtgttatatggtgaagatagaggtgcgaacttcaagagtatgcctttggagaaagatggattctgtgaaaaaggctgaaaggggagcgtcgccgaagcaaataaaaccccatcggtattatttgctggccgtgcattgaataaatgtaaggctgtcaagaaatcattttcttggagggctatctcgttgttcataatcatttatgatgattaattgataagcaatgagagtattcctctcattgctttttttattgtggacaaagcgctctttctcctcacccgcacgaaccaaaatgtaaagggtggtaatacatgggtcttattgtacaaaaattcggaggcacttccgtcggctcagtcgaaaaaattcaaaatgcggcaaaccgcgcaattgcagaaaaacagaaaggccatcaagtcgttgtcgtcgtttcagcaatgggaaaatccactgacgaattggtcagccttgcaaaagctatttctgaccagccgagcaaacgcgaaatggatatgctgctggcgacaggcgagcaggtcacgatttcactcctttcaatggcattgcaggaaaaaggctatgacgctgtgtcttatactggctggcaggcgggaatccgtacggaggccattcacggaaacgccagaattacagatatcgacacttcggttttagcagaccagcttgaaaaaggaaaaattgtcattgttgcaggcttccaaggcatgacagaggattgtgaaattacgacattgggccggggcggttcagatacaacagcagttgctttggctgccgctttaaaagctgataaatgtgacatatacacagacgtgccaggtgtgtttacaaccgatccgcgctatgtgaaatcagcgagaaaacttgcgggcatctcatacgatgaaatgcttgagcttgccaatttaggcgccggcgttcttcatccgagagcagttgagttcgcgaaaaattaccaagtgccgttagaagtgcgttcaagtacagaaaccgaagcgggaacattaattgaggaggaatcatccatggaacagaatttaattgtcagaggcattgcatttgaagatcaaatcacaagagtaaccatttacaggctgactagcggtctgacaactttgtctactatttttacgacacttgccaaaagaaacataaacgtggatatcattatccaaacgcagaccgaggacaagactggaatttccttctctgtcaaaacagaagatgcagaccaaaccgttgcggtgcttgaagagtataaagacgcgctggaatttgagaaaatcgagacagaaagcaaattggctaaagtatccattgttggatccggcatggtctcaaatcccggtgtagcggctgaaatgtttgctgtactggcgcaaaaaaacattttaatcaaaatggtcagcacatctgaaatcaaagtgtcaacagtcgtaagcgaaaatgacatggtgaaagcagtcgagtcgcttcacgatgcatttgagctttcaaaacacccttcagctgtgtaatgacaatcaaaaaggcgggactatgcagtcaccgcctttttgattacactgggtctttcatatcccatttcacagtcagaaccactttatcggctctctttttcacttgttcatatgattcggcaatctgatcattcatcaattgaatttgttcagcgataaaaccagcctccagctgaaagcaaggttctttctgatgtttaagccggttggaaataatcggcccttcaagttcaaattcaagctcctgttttttagcgcttacgttggtgagggttccccagcccgcttcttcaaagaaggccggaaattcctcccatgattcaagaggaaacttacgggcgagatgttttcctgcccaatacatcatggaagagtaatcttggccaagcatatctgggagaacgatctctcgtattagttcgtaggcataggcgttcatttcaatttcttttaggttgtcaatagatgcttcaaatttagacttcatatctgtctcccctctctcctgcgtatattatagctcaaacaggggggaggattacagaatgatcctgtaattcttatgaaaaattaagcaagaaatatatattgataaaataaaatttttcaatcaactaatcaattcggaaaattataatttatgtacgcgttttcttgacgcccttttgagggaggagtaaaatgaaattgtcaataaatcttaataaagtgcttacaattgaaagaagtgggggaagagatttagcacatttcgcacttatcaaacagggggtaaagtaatgtctgggaacagagagttttattttcgaagattgcattccttgcttggcgtcataccggtcggcatctttctcattcagcatttagtcgtcaaccagtttgccgcaaggggcgctgaagcattcaatagcgctgctcattttatggatagtctgcctttcaggtatgccttggaaatttttattatcttcttaccattaatttatcatgcagtttatggtgtgtacatagcgtttactgcgaaaaataacgcaggccaatacagctacatgagaaactggctattcgtcctgcagcgtgtaaccggtatcatcaccctcattttcgtcagctggcacgtgtgggaaacccgcattgccgcacaaatgggtgctgaggtcaatttcgacatgatggcgaatattttgagctctccggctatgcttggtttttacattgtcggtgttttatcaacaattttccacttctcgaacggtttatggtctttcgctgttacatggggcatcacggtaacgcctcgttctcaaagaatttcgacatacgttacgctgattatttttgttgcactgtcatacgtaggcttaaaagcgattttcgcatttgtttaagagtactagattactagagggagaggggctatcatgagtcaatcaagcattatcgtagtcggcgggggtcttgccggcctcatggcgacaattaaagcagcggaatcaggaatggcggttaaattgttttccatcgttcctgtcaaacgttctcattcagtttgtgcgcaaggcggcataaatggagcggtcaatacaaaaggggaaggtgactctccgtgggaacattttgatgacacggtatacgggggagactttcttgccaaccagccgccggtcaaggcgatgtgtgaagcggcgccttcaatcatccacttattagaccggatgggcgtcatgtttaaccggacgcctgaaggcctgcttgatttccgccgattcgggggtacacagcaccacagaactgcttatgctggtgcgacgacgggacagcagctgctttacgcactggacgagcaagtgcgcagatacgaagttgcgggtctggtcacaaaatacgaaggctgggaattccttggcgctgttttagatgatgacagaacctgccgtggaattgttgcacaaaacctgacaaacatgcaaattgaatccttccgttcagacgctgtcattatggcgacgggcggaccgggaatcatctttggaaaatcaacgaactccatgattaatacaggatctgctgcatcaatcgtttatcagcagggagcgtattatgcaaacggagaattcattcaaatccacccgacagccataccgggcgatgacaaattaagactgatgagtgaatcagcgcgtggtgaaggcggtcgcgtgtggacatataaagacggcaaaccatggtatttcctagaggaaaaatatccggcatacggaaacctggtgccgcgtgatattgcgacacgcgaaatatttgatgtgtgtgtgaaccagaagctcggcattaacggtgaaaacatggtatatctcgatctgtctcataaagatccgaaagagcttgatattaagcttggcggcatcattgagatttatgagaaattcatgggagacgacccgcgtaagctcccaatgaaaatcttcccggcggtccattattctatgggcggtttatgggtggattacgatcaaatgacaaatatccctggactgtttgcggctggggaatgtgattattctatgcacggcggcaaccgcttgggagcgaactccttgctgtctgcgatttacggaggcatggtggccggaccgaatgcggtgaaatatgtaaacggcttagaatcttcagcggaagacatgtcttcatcattattcgacgctcacgttaagaaagaagaagaaaaatgggctgatattatgagtatggacggaaccgaaaatgcctatgttcttcacaaagagctcggtgagtggatgacggcgaacgtaacggttgtccgccataatgacaagcttttgaaaacggatgacaaaattcaggagttaatggagcgcttcaaaaagatcaacatcaatgatacgacaaaatggagcaaccagggagcgatgttcacacgccagttctcaaacatgcttcagcttgcgagggtgattacccttggcgcatacaaccgtaatgaaagccggggcgcccattataaaccggattatcctgaacgtaatgatgatgaatggctcaaaacaacaatggctaaacatgtaagcccgtatgaagcgccggaatttgagtatcaggatgtcgatgtatcactgataacgcctcggaaacgggattactcgaagaagaaggtggcgaaataatcatgagtgaacaaaaaaccatacgatttattatcacacgtcaagatacagccgacagcacgccttacgatgaagaatttgagattccataccgcccgaatctgaacgtcatttccgctctgatggaaatccgccggaatccggttaatgtcaaaggtgagaagacaacccctgtcacatgggatatgaactgtcttgaggaagtatgcggcgcatgttcaatggttataaacggaaaaccccgccagtcttgtacggcgcttattgaccagcttgaacagccgatccgtttaaaaccaatgaaaacattcccagtcgttcgtgatttgcaggttgatcgcagcagaatgtttgattcattgaaaaaagtaaaagcatggataccgattgacggtacgtacgatttaggaccggggccgagaatgccggaaaaacgccgtcaatgggcatatgaattatcaaaatgcatgacatgcggcgtctgcctcgaagcttgcccgaatgtgaacagcaaatcgaagttcatggggcctgcaccgatgtcgcaagtccgcctgtttaacgcacatccgacaggcgccatgaataaatctgaacgattagaagcattaatggatgaaggcggccttgcagattgcggcaactcgcaaaactgtgttcaatcctgtccgaaggggattccgcttaccacttcgattgcagccttgaatagagatacaaacttacaagcgttccgcaatttcttcggaagcgacagagtataagaagaaaaaacctcttccgcatgggagaggtttttttaaacaataaggagatgaaagaagatgaagcttcccgcttatattgatatgccgtttcaagaatggaaaacatccttttcttttttcaatgaggtatccgtaagattttccgagacagacatgtttgggcatatgaataatgtaaccccttttatatattttgaggaggcgcggatttcttattttaaaaagctgaatatgatgagtgaaaacatgacagtcgtggcaagccagcaatgcgattatttgcgccaagtcatgccttatgaagagttgcgcatctatgtgaaaacaagcgcagtcggcagttcatctcttaccttgcactatctcggagagaacctcgaaggcgagccctgcttcaccggggcagtcgtgatggttcaagtctcaaaggaaagcggcaaggctgtcagctggacggatgaggagaaagaaacgcttcttcatacacgataaactaattatcttgtaaacgtcacctcctgcgcccttcttacatatgatatctcgactatatcaaaacccattcgtttctgattcgctctcaccttagcaaggagggttacaatacttgaaggagaaagaatttcaatcgaagccgctgctaacgaaaagagaaagagaagtgttcgaattgctcgttcaagataagacaacaaaggagattgcaagcgagctatttatcagtgagaaaaccgttcgaaaccatatttcaaatgccatgcagaaattgggtgtgaaagggcgttcgcaagccgttgttgagcttcttagaatgggtgagctagagctttaatccttgccggtattccttcttttaggaaggagccggttattgctgtttgtttggaacattcgaaaccatatttggaatgctgtgaaaaacgtaggcaagtcataaattaaattttatttcttgatgttgtttgactaaagtcctctatttctctcctgcgagtcttgcattttcttcaaaaaagaaggaaaatagacacggaacgcttttgtgcgtaagagatccttgagtgagggatggacaaatgacatcaaaacctttggagcatgttgcggatattgaaaagtcactccgccacattgccgcgatcattaagcaaaaaggacgagaaatccttaaccaatatgcgattacgccgccgcaatttgtcggcttgcaatggctttatgaattaggagatatgacaatcggtgaattatcgggcaaaatgtatctggcatgcagcacgacaacggacttaatcgaccgcatgcaaaaaaatgagcttgtggagcgggtcaaggacccggcggacagacgtgttgtccggatacatctgctgcctgaaggagaacggattatccaagaggtcattacaaaaagacaggaatatctgcgtgatatgtttgaatcgtttacagatgaagaaatagccatcttcgaaaaatctttgatgaaactgcagcatgaaatgaagagaaaatgaggcgattttgttggaacaaccaataggagtcattgattccggggttggcggtttaaccgttgcgaaggaaatcatgagacagctacctaaagaaaatattatctacgtcggggatacgaaacggtgtccttatgggccgcgccctgaagaagaggtgcttcaatatacgtgggagctgacgaattatttactcgaaaaccaccacatcaaaatgctcgtgatcgcctgtaatacagcaacagcgatcgcattggatgacatccagcgaagcgtcggtataccggtggtcggagtgatccagcctggtgcgagagcagcgataaaagtgacggataatcagcatatcggtgtcatcggcacagagaatacgattaagagcaatgcatacgaagaggcgcttttggcattaaatcctgatctgaaggttgaaaaccttgcttgcccgttgcttgtgccttttgtggaaagcgggaagtttcttgacaaaacagcagacgagattgtcaaaacctcgttgtatccgttaaaagatacatcgattgattcgctgattttaggctgcacccactatcccattttaaaagaagccattcaaagatatatgggagaacacgtgaacattatttcgtccggcgatgaaacagcccgggaagtcagcacgattctctcgtataaagggctgctgaaccagtctgcgaatgcccctgatcatcagttcttgacaacaggagcgcgtgatcagtttgcgaaaatcgcagacgattggtttggccatgaggtgggccatgtggaatgcatctcactgcaagaaccgattagaagatagttttccccgcaacggtatgttgcgggtttttttctgttttgccggaattcttcggtctatttcctaaagaggctcgtatacataatagtacaaacatccttaggagggaaaagtatgctgaaaaaaggacctgcagtcattggtgccacttgtctcacctctgccttgcttttatccggatgcggtttgtttcaatctgataaggcagccgaggaaattgatccgcctcaagacgttacattcgtgaacgatgaagcgggtgccaattcaaatacaacagcagccaaaaaaacagaaagtgaaaaaagcgataccgcaaaagcggatcaagcctcatctactgttatgagggagctttatctcattgataaaaacggatatgttgttgcgcaaacgctgcctctccctaaaagtgagagcacggctaagcaggcgcttgaatacctcgtacagggcgggcctgtgtctgaaatccttccgaatggcttcagagctgtattgccggctgacaccaccgttaacgttgacatcaaaaaagatggaaccgcgatagctgatttctctaatgagttcaaaaattataagaaagaagacgaacagaaaatcgttcaatctgtgacgtggacgctgacgcaatttagttcgatagataaagtgaagctgagaataaacgggcatgaactgaaggagatgcctgtaggagggacgccgatctcagatgatttaagccgcaaagacggcattaatttggaaacagccggtgtaaatgatctcactgctacccatccgctgacagtctactatttggcggaaaatgaagacagtgaatactacgtgccggtgaccaaacgaatcgacaattcggaaaaagacgacgttacggcagccatcaatgaattggctaaagggccgagcaaggtgagcgggctgttaacagacttcagtgaagatgtaaagcttgtcagcaaaccgaaaatcaaagacgggcgcgtgacgttggatttcaatcaatctatattcggcagcgccgatgagaagacgaaaatgatttcttcagaagtgctgaacagcattgtgctgacgttaacggagcagccggatgtaaaaagcgtctctgttaaagtgaacggaaaatcagagcttgtaaatgaaaaaggcgaaaagctcacagaaccggtctccagaccttctcaagtgaatacgggtagtttttaaattgggatttttgatatactagaaagaaagaggttagcgttccggctgcctctttctttattcaattccgggacaaaaatggtttatgtacatacaatcggaggtaaaacatgagacatgacggaagacaacacgatgagctgcgtccaatcacattcgatttggattttatcagccatccggaaggttctgttctaataacagcagggaatacaaaggtaatctgcaacgcgtctgttgaggaccgcgtaccgccgtttttgcggggcggagggaaaggctggattacagcagagtacagcatgctgccgcgggcaacaaaccaaagaacaatcagagaatcttctaaggggaaaatttctggcagaacaatggagatccaacgcctgatcggccgcgcgcttcgagctgttgtagatctggaaaagctcggtgaacggacgatttggattgactgtgatgtcattcaagctgatggaggaactagaacagcttccattacaggcgcatttcttgctatggcgattgcgattggcaagctgatcaaagcaggaacaatcaagacaaatccgatcactgattttcttgctgcgatctctgttggaattgataaggaacagggaattttgttagatttaaattatgaagaagattcctccgctgaagttgacatgaatgtcatcatgacaggcagcggccgttttgtggaactgcagggaaccggggaagaggcgactttttcaagagaggatctgaacggtcttctgggtcttgcagaaaaaggaattcaagagctgattgacaagcaaaaagaagtgctgggtgattctctgccagaactgaaataaagacagaaaggcttgatcatcatgaaagaagcaattattgcgacacataatccgggaaaagtgaaggaattcaaagaaattcttgagccaagaggctatgatgtcaaatctttagctgaaattggatttacagaagaaattgaagaaacaggccatacatttgaagaaaatgccattctgaaagcggaagctgttgccaaagcagtaaacaaaatggtgattgcggacgactccggtctatccatcgataatcttggcggcaggcccggggtttattcagcccgctatgcaggggaacagaaagacgaccaggcaaatatcgaaaaagtgctcagcgagctgaaaggtatcgaaaaagaacagcgcaccgcccgtttccgctgcgcactggccgtgagtattcccagtgaggaaacaaaaacagtcgaaggccatgttgaagggtatattgccgaagaaccgagaggagaatatggctttggctatgacccaatctttatcgtgaaagataaagataagacaatggctgaactgacaagtgatgaaaaaaataaaatcagccatagggctgacgcacttaaaaagctatctaagcttttggaggcataaggaggaagcttgtacatgaacgtgctgattatcagtgacagccatgggcttgaagaagaactccaaaccattgcgaaacggcatgaggcagaagttgatcttatgattcattgcggggactctgagcttgaaacgaggcatcctgcattggagccttatgcggttgtaaaaggcaattgcgattttgccggcgattttaaggacgagcttcttctgaatgccggctcaagaaaaatactggtcacacacggccaccttcacggtataaaacagaccttgttaaacgtatactatcgtgcagaggagctcggagcggatgttatctgcttcgggcattcgcacatcgcgggcagcgaagtgctgcgcggaaaactgatgattaacccaggcagcatccggcttccgagggtgcgcaggacagaaagctatgctatactgacattagaaaatgatgctgcgtcagtccgtttttacgaccaagcaggcaatgaaattgaggatctgcaaaatcgagtcacactatgaaaatgtcatgaggaagaaaattttcttcctcatgaaaaaaattctaaaaaaccgttgacttattattgcatcccatatataataaatcttgtcgctgatagttaaagcgaaaaacaaaaaataaaacgtgtcccagtagctcagctggatagagcaacggccttctaagccgtcggtcgggagttcgaatctctcctgggacgtaccaaaagaaaaacctcaaatcctaaatggatttgaggttttttgttgtcgtgttatgattttcatttgttatttaacggatcatcatccaagccgtcagcttttccttctttatacagacgaggttcttcttttttcacagtttcagaaatatgttcattttcttcaacagtgcgtttgccgacaaccacttcatcagtgacaaccggttttttagtcacttccagcttttcctcaacgattggcactctgatctcttccgaatcgttgacgggagcagcgtccgttttattttcatccactggacggcgttcgacataaatttcatcatgtctcaccgggatgtccatatctcttttttctgttttcacttcttttcctatttctacttcgccggtttgaacgtcttccttatcgactttcagctgttcttcccggagcggcatcgttttttcttctttcgttgtataatccgccacttcatttgcgcttgaaaagccgcctgaaagggcattgccgttatcaataggagcatttacatctgcatctgtatcgacggctaccagaagttttccgtcatccaaatcttcttgatacttgtctatttcatccgttttaatatccaaatcggataatgctttgctgtgtgcagcagtatcatccattgtgaaataatctttcagtttatcgaaaaaagattcagattcgccctgatgtgcatcgatggcttgattgacctctgttcctgtacgtgactccaaataatctgtatctcgccggcttgttactacagagatgtcgtcagaatcatagccttttgtgagtaagccttcaatcgctgcgatggtttcctgcggagtttcgaatacaccaactatgcttttcatatcaatctcctcctttatgaatttgcatgatatcgttcatgtcgtttgtaattcccgctgttctttgaattaaacaaaattgaaaacattgggcgggtatcaaaagggtgaaaagtgtgtaaatacaaaaaaatagataagacagactttcctctgtcttatctatcttcatagttgcagttccttcgtcataaacacactgttcggatcttcaacatagtctgcaaacggttcgcaatactgaaaaccaaagctttcatacaattttcttgccggctcaaatgaagtcattgaacccgtttctaagcttagtcgctcataacctcgcttctcggcttcttcaatgatgtgctggagaacttgtttggcaacgccttttcttaaatgtgaagcagaagttcgcattgatttgatttctccatgccggctgtccagttcttttagcgctccgcagccggcgagttcatcaccctcccatgcactccaaaatgttatttcaggctctcttagtttctctaaacctaaggcatgagtgctttctggcggggacataagcgtcatgctatgtaaatgctcattcacaagtgagaccacctgacgtccagttaaatcgtctatttttatatgcaattttattcctcctcaaactttgatcttaatcatatttcatcctgtttccaactataaagacagaaaatctgacagtattgaagcccctttgaaatatatgagttgcaaaagatgtttgaaagcaaaaaaagaggccgaaatcgttgttcggcccttgcagtcttctttaatatctaaagcctccatgcacaccggctgttccgctaaaaccgccgacatgtgtcgctggaatactgaacccgccgctatggccgctgaagccagtgcctgaaaattgctgcccgaaaaaatctgaagtgtatggataagaggagtacatagcagagggagtggtcaacgggctatatgcctggctgaacggctgtccgtatccgtagcctccaaatggctgctggctttgctggtaaaaggcaggggaagcaggataatgctgctgcggaaagctggggaagcttggaaagcccgcaggaaatccttgcatgtctgcaaatgatttattcatcgtatcaccttttctttgcaagataccattaatgtatgccgagggaacaaggggagtgcctatccgaattgaaatggtttgcaagatgatctgtcagactcaaatcctattcgaatcacagtgtgttataaaatcttacacgtttatgtgaaattgcattattctggtgtatccttgatagattaataaaaaaattataaaaacttttaacatttgcaattccttttgtaccaataatgaaagcgtatacaatatagattgattaatcaaaattgtctaataattttaaaaaatgctgttgacactgcgtccaaagcggcgtaatatgagttcaacaaaagataacgcaagcttcacaagcgaaaatgatcgcaatatgattctgaaaaaatgaaaaacaatcgacctttttgaacagcttacaagtcgttctgaaggctgaatatgaaaagcgcagatgaggataagtagccttgataaagctttccacagagaaccgggttagctgagaaccggcgaagctttacaaggtgaactcgcctcagagtgccagtctgaaatgacagtaggacttggccgggtgaatttgattcactcgttactaaagcggatagaaatatccatgagacggccgactaaggccgtaaacaagggtggtaccgcggaaagaaaagccttttcgccccttttagctatcgcagttactgcgcggctgattgtgggcggaagggctttttttattgaataatcagctatctagctaatgaaaagatgatctttaaaggatgaaaatccaaaaggaggaactaaaatgaggactaatgtacaggtggattcagcatctgccaaatgtacacagacgatgagcggagcattaatgctgattgaatcattaaaaaaagagaaagtagaaatgattttcggttatccgggcggggctgtgcttccgatttacgataagctatacaattcagggttggtacatatccttccccgtcacgaacaaggagcaattcatgcagcggagggatacgcaagggtctccggaaaaccgggtgtcgtcatcgctacatcaggaccgggagcgacaaaccttgttacaggccttgctgatgccatgattgattcattgccgttagttgtctttacagggcaggtggcaacctctgttatcgggagtgatgcatttcaggaagcagacattctagggattacgatgccggtgacaaaacacagctaccaggttcgccagccggaagatctgccgcgcatcattaaagaagcgttccatattgcaacaactggaagacccggcccagtattgatcgatattccgaaagatgtagcaactattgaaggagaattcagctacgatcatgagatgaacctcccgggataccagccgacaacagagccgaattacttgcagatccgcaagctagtagaagccgtgagcagtgcgaagaaaccggttatcctggcgggtgcgggcgtactgcacggaaaagcgtcagaagaattaaaaaattatgtcgaacagcagcaaatccctgtggcgcacacccttttggggctcggaggcttcccggctgaccatccgcttttcctggggatggcgggaatgcacggtacttatacagccaatatggcccttcatgaatgtgatctattaattagtatcggcgcccgttttgatgaccgtgtcacaggaaacctgaaacactttgccagaaacgcaaagattgcccacatcgatattgatccagctgaaatcggaaaaatcatgaaaacacagattcctgtagtcggagacagcaaaattgtcctgcaggagctgatcaaacaagacggcaaacaaagcgattcaagcgaatggaaaaaacagctcgccgaatggaaagaagagtatccgctctggtatgtagataatgaagaagaaggttttaaacctcagaaattgattgaatatattcatcaatttacaaaaggagaggccattgtcgcaacagatgtaggccagcatcaaatgtggtcagcgcaattttatccgttccaaaaagcagataaatgggtcacgtcaggcggacttggaacgatgggattcggtcttccggcggcgatcggcgcacagctggccgaaaaagatgctactgttgtcgcggttgtcggagacggcggattccaaatgacgctccaagaactcgatgttattcgcgaattaaatctgccggtcaaagtagtgattttaaataacgcttgtctcggaatggtcagacagtggcaagaaattttctatgaagaacgctattcagaatctaaattcgcttctcagcctgacttcgtcaaattgtccgaagcatacggcattaaaggcatcagaatttcatcagaagcggaagcaaaggaaaagctggaagaggcattaacatcaagagaacctgttgtcattgacgtgcgggttgccagcgaagaaaaagtattcccgatggtggctccggggaaagggctgcatgaaatggtgggggtgaaaccttgaaaagaattatcacattgactgtggtgaaccgctccggcgtgttaaaccgaatcaccggtctattcacaaaaaggcattacaatattgaaagcattacagttggacacacagaaacagccggcgtttccagaatcaccttcgtcgttcacgttgaaggagaaaatgatgttgaacagttaacgaaacagctcaacaaacagattgatgtgctgaaagtcacagacatcacaaatcaatcgattgtccagagggagctggctttaatcaaggttgtctccgcaccttcaacaagaacagagattaatggaatcatagaaccgtttagagcctctgtcgttgatgtcagcagagacagcatcgttgttcaggtgacaggtgaatctaacaaaattgaagcgcttattgaattgttaaaaccttatggcattaaagaaatcgcgagaacaggtacaacggcttttgcgaggggaacccagcaaaaggcgtcatccaataaaacaatatctattgtataaaacataacaagggagagattgaaatggtaaaagtatattataacggtgatatcaaagagaacgtattggctggaaaaacagtagcggttatcgggtacggttcgcaaggccacgcacatgccctgaaccttaaagaaagcggagtagacgttatcgtcggtgttagaccaggaaaatctttcactcaagcccaagaagacggacataaagtattttcagtaaaagaagcggcagcccaagcggaaatcatcatggttctgcttccggatgaacagcagcaaaaagtatacgaagctgaaatcaaagatgaattgacagcaggaaaatcattagtattcgctcatggatttaacgtgcatttccatcaaattgttcctccggcggatgtagatgtattcttagttgcgcctaaaggcccgggacacttggtaagaagaacatatgagcaaggagctggcgtacctgcattgttcgcaatctatcaagatgtgactggagaagcaagggacaaagccctcgcttatgctaaaggaatcggcggcgcaagagctggcgtattagaaacgacatttaaagaagaaacagaaacagatttgttcggtgagcaagcagttctttgcggcggattaagcgcgcttgtcaaagccggatttgaaacattaactgaagcaggttatcagccagaacttgcatacttcgagtgtcttcatgagctgaaattaatcgtagaccttatgtacgaagaaggacttgcaggaatgagatattcaatctctgacacagcacagtggggagatttcgtatcaggtcctcgcgttgtggacgctaaagtaaaagaatctatgaaagaagtattaaaagatatccaaaacggtacattcgcaaaagagtggatcgtcgaaaaccaagtaaaccgtcctcgtttcaacgctatcaatgcaagcgagaacgaacatcaaatcgaagtagtgggaagaaagcttcgtgaaatgatgccgtttgtgaaacaaggcaagaagaaggaagcggtggtctccgttgcgcaaaattaattttttcgatacgacgcttcgtgatggtgaacagtcccctggagtgaacttgaatacacaggagaaacttgccatagctaagcagctcgaaagactcggggcagatatcattgaagcgggatttcccgcttcgtcccgaggtgactttttagctgttcaggaaatcgcaagaaccattaaaaattgttcagtaactggtctggcccgttgtgtaaaaggtgatattgatgctgcttgggaagcgttaaaagaaggtgctcatccgagaattcatgtttttatcgccacatcggatattcatttgaagcacaagctgaaaatgacacgtgagcaagtcattgaaagagcggttgaaatggtgaaatacgcaaaagaacgttttccgattgtgcaatggtcagctgaagatgcctgccgcactgaactgccgtttctagcagaaatcgtcgagaaagtgattgacgcaggcgccagtgttatcaatcttccggacactgtcggctacctggcccctgcggaatacggaaatatctttaaatatatgaaggaaaacgttccgaacattcacaaagcaaagctttcagcccactgtcatgatgatttgggaatggcagtcgcaaactctcttgctgcgattgaaaatggcgctgatcaaatcgaatgcgctgtgaacgggatcggtgaaagagccggaaacgcggcattagaggaaattgccgtagccctccataccagaaaagatttctaccaagtcgaaacaggcattacactgaacgagattaagagaacaagtgatttagtaagcaaactgacaggcatggctgtcccgcgcaacaaagcggttgttggagataatgcatttgctcatgaatcaggcatccatcaggacggctttttaaaggaaaaatcgacttatgaaattatttcaccggagcttgtcggcgtaaccgcagatgcgcttgtcctaggtaaacattccggacgccacgcatttaaagaccggctgactgctttaggattccaatttgacagtgaagagattaataaattctttacgatgttcaaagagttgactgagaagaaaaaggaaatcactgatgaggatcttgtttctcttattttagaagaaaaagtaacagatcgcaagattgggtatgaatttctttctctgcaagtacattacggaacaagtcaggtccctacggctactctttcgttgaaaaatcaagaaaatgcagagcttattcaggaagctgcaactggagctggaagcgtggaagcaatctacaatacgcttgagcgctgcatcgataaggatgtggagctcttagactaccgcattcagtctaacagaaaaggcgaagatgcatttgctcaggtgtatgtaagagttttggtgaacggaaaagaatcagcagggcggggcatagcgcaagacgtattagaagcatcagcgaaagcttatttgaacgcagtcaaccgtcaattggttttccagtcgaatatgagcggattgaaaaaccacacagctgtcggatcataaaagaaaggagaacggttaacttgaagaaacgtattgctctattgcccggagacgggatcggccctgaagtattagaatcagcgacagacgtactgaaaagtgttgccgaacgctttaaccatgaatttgaatttgaatatggcctgattggaggggcggctattgatgaacatcataaccccctcccggaggaaaccgttgctgcttgtaaaaatgcagacgcgatattgcttggtgctgtcggcggaccgaaatgggatcaaaatccttcggaactgagaccggaaaaagggctgctcagcatcagaaaacagcttgatttgtttgcgaatttacggcctgtgaaggtatttgaaagcctttctgacgcttcgcctttgaaaaaagaatatatagataatgttgatttcgttatcgttcgtgagctcacaggcggcttgtatttcggccagccgagcaaacgctatgtaaacactgaaggtgagcaggaagcagtagatacactgttttataagcgaacggaaattgaacgagtgatcagagagggcttcaaaatggcggcagccagaaaaggcaaagtgacctctgtagataaagcgaatgttcttgaatcaagccggctgtggcgtgaagtggctgaggacgttgcacaagagtttcctgatgtgaagcttgagcacatgcttgtggataacgcggccatgcagctaatttatgcaccgaatcaatttgatgtcgtggtgactgaaaatatgttcggtgatattttaagcgatgaagcgtccatgcttacaggctctctcggaatgctcccgtcagccagcctatcaagctctggtcttcatctgtttgaacctgttcatggctccgcgcctgatattgccggtaaagggatggcaaatccgttcgcagccatattgtcagcggcaatgcttttgagaacatctttcgggcttgaagaggaagcgaaagctgtagaagatgcggtaaacaaagtcttggcttccggaaaaagaacaagagacttggcacggggtgaagagttcagcagcactcaggccattacagaggaagttaaggcagcaatcatgagtgaaaatacaatttctaatgtgtgacagcttacgttaagcggtcttagctctaggtagagggaggaaataaaagatgatgcctcgaacaatcatcgaaaagatttgggatcagcatattgtaaaacatggtgagggaaagccggatcttctctatattgatttgcacctcattcatgaggtgacgtctcctcaggcatttgaaggcttgagacaaaaggaaagaaaggtcagaagaccccaaaacacatttgcgacaatggaccacaacatcccgactgtcaatcgttttgagataaaggatgaagttgcgaaacgccaggtaacggcgcttgaaagaaactgtgaggaatttggcgtgcgccttgccgatcttcacagtgtggatcaagggattgtccatgtcgtcggacctgaactaggcttaacgcttccagggaaaacgattgtgtgcggggacagtcatacatcaacacatggcgctttcggcgctcttgcatttggaatcgggacgagtgaggttgaacatgtcctttccacacagacactttggcagcagcgtccaaaaacacttgaagtgcgcgtagatggaacgcttcaaaaaggggtaacggcaaaggatgtcatccttgctgtcatcggcaaatacggtgtgaaattcggcacaggctacgtcattgaatacactggggaagtattcagaaatatgacgatggatgaacgaatgaccgtttgtaacatgtcaattgaagcaggagcaagagcaggtttgattgcacctgacgaggtgacgtttgaatattgcaaaaatcgcaagtacacgccaaaaggcgaagaatttgacaaggccgtagaggaatggaaggcgctgcgcacagacccgggcgctgtttacgataaatctattgtccttgacggcaacaaaatttcccctatggtgacatggggcattaacccgggaatggttcttcctgtcgattctgaagttcctgcgccggaaagcttttctgcagaagatgacaaaaaagaagcgattcgcgcttatgaatatatgggacttactcctcatcaaaaaattgaagacattaaagtggagcacgtatttatcggttcctgcacaaattcccgcatgactgaccttcgacaggctgctgacatgatcaaagggaagaaggtagctgacagcgtaagggccatcgtcgtgcccggatcccaaagcgtgaagcttcaggctgaaaaagaagggcttgaccaaattttcttggaagctggatttgaatggagagagtcaggctgcagcatgtgtttgagtatgaataatgatgttgttcctgagggagagcgctgtgcatcaacctctaaccgcaactttgagggcagacaaggaaaaggtgcaagaacacatctcgtcagcccggcaatggctgcgatggctgccattcacggacacttcgttgatgtcagaaagttttatcaggaaaaaacagttgtgtaaggagtgcgcgagatggaacctttgaaatcacatacggggaaagcggccgtattaaatcggatcaatgtggatacagaccagattattcctaagcaatttttgaagaggattgaaagaacaggctacgggcgttttgcattctttgactggagatatgatgcgaatggtgaaccgaaccctgaatttgaattaaaccagcctgtttatcaaggagcttccattttaatagcaggagaaaacttcggctgcgggtcatcgcgtgaacacgctccgtgggcacttgatgattatgggtttaaaattatcattgcgccgtcatttgctgatatttttcatcagaactgctttaaaaacggcatgcttccgatccgcatgccatatgacaattggaaacagcttgtcggccagtatgaaaaccagtcattgcaaatgactgttgaccttgaaaatcagctgattcatgacagtgaaggcaatcaaatttcatttgaagttgatccgcattggaaagagatgctgatcaacggatatgatgaaatttcattaacgctgctgctggaagatgaaatcaagcaatttgaatcacaaagaagctcttggcttcaagcctgaaaaagcggccggtatttgtccggcggctttttttgcctggtgaaacctttcatttcttgtttttgttcacaggtgttgatacacttgaacaaaataaatgcctgaaaggaatataggtatgacgcatgacaagaaaaacgcaaaaattattccttttcctcatctgaaagaccgccttgtggaaaaagggatgtcatcactcaaggaaaaaaagtatcaagaagcgcttgaactgttttcagaagcgatgaaatatgatgatactgaatccgatcttcacttagggatggccatctgctttttagagctgggcgagctggaagaggcagaaagcgtgtgcgagaagatgctcaaagaaggttatggccattattttacggttttgcaggtgtacatgaccatcttaattcagctcaaaaagtacgaagaagtcaaaagcaccattgaagccgttttggaagaaaatcagctgccggcagaaagtgccgagcaattttataagctgctggatttcagccggaaaatgaccgatccggatcgtgaggacgaggcttgggccgaagaatatgaggatacaattgacaccgagaaagtgctggcaagccctgaggagcaaatgaatctcattcattccttaaaagaccgtaacgtagcaaagtatacaggattgctcaaaacaatcctccaagacccctcagcccatccgattatcaaaacgatgattgtcatgctgttggctgagcatgagtacagtaaacctgtacacattagtaaatttggcgagtcgttgacaattgaaccgtcagagattgttccgcctgatgccgcgccgattcttcaccgtgttctcagggtgctagatgagacacttggaaatgaaaatccaaccttatatgcagcagtagaagaattgtggagaagacatttgtacgttttatatccgttccagccgaaattgctgtcggctgacctttgggcggctgcccttcataaagtcggttacgagatgcacgggattgaaattgaaagcgaagaacttcatatgatgtatgaatttacagacagagaactcgatgaagcttgcacaatgttaaaagatattgaagaaatttcttatttgtaaatcgcgccatatagttgaaagcgctatgtgttatgttataatatagtggttgtatttgtgtataacgggttataagaaatacggttggacaggctttgcagttcattattaacatctatacataatgattctgatctttggcagctttgtttttgttggacgaagccgaatgattgctttagaatggaagaccgacacaacctgaatagatttttggagggaaacacatgtctgtaaaatgggaaaaacaagaaggcaacgaaggcgttttaacggttgaagttgatgctgaaacgtttaaaacagcacttgatgatgcatttaaaaaagtagtaaaacaagtttcaattcctggattccgtaaaggtaaaattcctcgcggattattcgaacagcgctttggcgtagaagctctttaccaagatgctttggatattcttcttcctgtagaataccctaaagcggttgaagaagctggaatcgagcctgtagaccgtcctgaaatcgatgttgaaaaaatcgaaaaaggcgaaagcttaatcttcactgcgaaagtaacagtaaaacctgaagtgaagcttggcgaatacaaaggcctgggcattgaaaaagacgacacaactgtaactgacgaagatgttcaaaacgaactaaaagcccttcaagagcgtcaagctgagcttgttgtaaaagaagaaggcgccgttgaagaaggaaacacagttgttcttgatttcgaaggattcgttgacggcgaagctttcgaaggcggaaaagctgaaaactactctctagaagtaggttctggttcattcatccctggcttcgaagatcaattagttggccttgaagcaggtgctgagaaggatgttgaagtgacattccctgaggagtaccacgctgaagatcttgcaggcaaaccagctgtgtttaaagtgaaaattcacgaaatcaaagcgaaagagcttcctgagcttgacgatgaattcgcaaaagatatcgatgaagaagtggaaacacttgctgaattaactgaaaaaacaaagaaacgtttagaagaagcaaaagaaaacgaagctgacgctaaattgcgtgaagagcttgttctgaaagcttctgaaaatgctgaaatcgatgtgcctcaagcaatggtcgacactgagcttgaccgcatgctgaaagaattcgaacagcgtctgcaaatgcaaggcatgaaccttgagctttacactcaattctcaggccaagatgaagctgcgcttaaagagcaaatgaaagaagatgctgaaaaacgcgtaaaatctaacctgactcttgaggcgattgcgaaagcggaaaaccttgaagtatcagatgaggaagttgatgctgagcttacaaaaatggctgaagcatacaacatgcctgttgaaaatattaaacaagccatcggttctactgacgcgatgaaagaagatttaaaagttcgcaaagcaattgattttcttgtagaaaaccgttaatatggtgcataataatagtactaataaaacagggcgcgaatcattcgtgccttgttttgtacaattatgagttatctctttttcttggggcaatatagttaatgcagggctgttttttgtcatacatatagaatgtgcaagtcagaaacacattgttaccgtctttttggaaagtatggtaaaatgcaatacatactcgttcgtttcaagaatcattttcttttgctctgccggtaaaagaaaaagtgagacaagattaaggggtgaaagaatgtttaaatttaacgaggaaaaaggacaattaaaatgctcgttctgtggaaaaacacaagatcaggttcgtaagcttgtagctggacctggtgtatatatatgtgacgaatgtatcgaactctgcactgaaattgtagaggaagaactcggaacagaagaagaagtagaatttaaagacgtaccaaagcctcaggaaattcgcgaaattttgaatgaatatgtcatcggccaagatcaagcgaagaaatcacttgctgttgctgtgtataaccactataagcgcattaactccaacagcaaagttgatgatgttgagctttcaaaaagtaatatttcattaatcggccctacgggaagcggtaaaacccttctggcgcaaacattggctcgcattttaaatgtgccgtttgcgattgcggacgctacatctttgactgaagctggatacgtgggtgaagatgtagagaatattctcttgaagctcatccaagctgctgattatgatgtggaaaaagccgaaaaaggcattatctatattgatgaaatcgataaagtggctagaaaatctgaaaacccgtctatcacacgtgatgtgtcaggtgagggtgtacagcaggcattgcttaaaattcttgagggtacagtggcaagcgtaccgcctcaaggtggacgtaagcatcctcatcaagaattcattcaaattgacacaacaaatattttgttcatttgcggcggagctttcgatggtatcgaacaaatcatcaaacgccgtttaggccaaaaagtgattggattcggtgccgacaataaagctgctgatcttgagaaagaagatcttctttcaaaagtgcttccagaagatttgctccgtttcgggttaattcctgaatttatcggacgtcttccggttattgcaagccttgaaaagcttgacgaagaagcattggttgcgatcttaacaaaaccgaaaaacgctcttgttaagcaattcaagaaaatgcttgagcttgacaacgttgagcttgagtttgaagaagaagcgctttctgaaattgctaaaaaagcaattgaacgcaagactggagcacgcggactccgttctatcattgaaggcatcatgcttgatgtgatgtttgagctgccttctcgtgatgacattgaaaaatgtgtaatcaccggggcaactgtgacacacggagagcctcctcgcctcttattaaaagacggcactgaggtaagccaagataaaacatctgcataaagataagcacaaacctcctgagtggtaacactcaggaggtttttttgcatgcaactcttccggaaaaacgtttattcccgtcttctatgggagatactagcaatcagaggaatgaattggatacataaattgtttttcaggagggaccaccatgagttggacagggatcgcgttatttattcagctgttttttgggatcatcatcggtttgtatttttggaatttgcttaaaaatcaaaggacacaaaaggtcacgatagataaagaatcaaagaaggaaatggagcagcttcggaaaatgcgcgctatcagcttgtccgagccattatctgagaaggtccgccccaaaagctttaaagatatcgtcggacaggaagacggcattaaagcattaaaggcggctttatgcgggccaaatcctcagcatgtgattgtctatgggccaccgggagttgggaaaacggctgctgcgcggcttgtgttggaagaagcaaaaaaacataaacaatcaccgtttaaagagcaggctgtctttgtggaactcgatgcgacaacagcccgttttgatgaaagaggaattgccgatccgctcatcggctctgtccatgacccgatataccaaggggccggagcgatgggacaggctgggattccgcagccgaagcagggagctgtcacccatgcccatggcggtgtgctgtttattgatgaaataggggagctgcatcctattcaaatgaataaaatgctgaaggtgcttgaggacagaaaagtctttttagacagtgcgtattacagtgaggaaaatacacaaattccgaatcatattcatgatatttttcaaaatgggctgccggctgattttcgcttgattggcgcgaccacgagaatgccaaacgaaattccgccagctatccggtcccgctgtttggaggtttttttccgcgagcttgaaaaggacgagctgaaaacggttgccaaaacagcagcggataaaattgaaaaaaatatctccgaagaaggactggatcttttgaccagctacacgcggaacgggcgggaagccgtcaatatgattcaaatcgcagcggggatggctgtaacggagaatcgaaaggacattacgattgaggatattgaatgggtcattcactccagtcagcttactccaaagcacgagcaaaaaatcggtgttgaaccacaggttggcattgtaaatgggcttgcagtctatgggcctaacagcggatcgcttctggaaatcgaagtaagtgtaaccgcggctcaagataaaggatcaattaacatcacaggaatagctgaagaagaaagcatcggcagccaatcaaaatcgatcaggcgaaaaagcatggcgaagggttcggttgaaaatgtattaaccgtgctccggacaatgggaatgaagccttctgattatgatattcacatcaatttcccaggagggattccgattgatgggccgtcagcaggcattgcgatggcggcggggattttctcggcgatacacaaaattcctattgacaataccgttgcgatgacgggcgaaatcagcctgaacggtcttgtgaaacccatcggaggcgtcattccgaaaataaaagcggccaagcagtccggtgcgaaaaaggtgattatcccatatgaaaatcagcaggccatcttaaagcagattgacgggatcgagattattgcagtgaagacgttccaagaagtgcttgatgaaattttggtgaatccgccaacggaacaaaaaccgtttcatatcgaaatcaataaagaatccgtttaaaccctattttgataatagggtttttttcatgaaggacatcttttcctttttcatatcagaaagaaagggtatactacgaggagactgttttatagaaaatggaaccatgccgtttattgtacaaggatgaaaaagttgtattataatggttcatactaaagtcacggaggtgtcagtcacatggcagaagaattaaaacgcagcatcccgctcctccctttaagaggtttattagtgtacccgacgatggttttgcatttagatgtaggacgtgacaagtcggttcaggctcttgaacaggcaatgatgcatgatcatatgatatttttagccactcagcaggatatttcgatagacgaacctggtgaagacgagattttcactgtcggcacctatacaaaaattaagcaaatgctgaagcttccgaacggtacgattcgtgtgttggtggagggcctcaagcgcgcccatatcgtcaaatacaatgaacacgaggattacacgtcggttgacattcaacttattcatgaagatgattcaaaagatacagaagacgaagcattgatgcggactttgctagaccactttgatcagtacataaaaatttctaaaaaaatctcggccgaaacgtacgctgcggttactgatatcgaagagccggggagaatggcagacatcgttgcttctcatctgccccttaaactaaaggataagcaggatattttagaaacggctgatgtcaaagacaggctgaacaaggtcattgattttattaataatgaaaaagaagtgctggagattgagaaaaaaatcggccagcgcgtcaaacgttcgatggagcgtacgcagaaggaatactacttgcgtgaacaaatgaaggcgatccaaaaagagcttggcgataaagaaggcaaaactggcgaagttcagacgctgacggaaaaaatcgaagaagcaggcatgcctgatcatgtgaaagaaacagcgcttaaagaattgaacagatatgaaaaaattccgtcaagttctgcggaaagctctgtgatccgcaactatatcgactggctggttgctcttccgtggacggatgaaacagatgataagcttgatttgaaagaagcaggacgtctcttggacgaagagcaccacgggcttgaaaaagtaaaagaacgtattttagaatatttggctgtccagaagctgaccaaatccctgaaaggcccgattctctgtttggcaggacctccaggtgtcggaaaaacgtctttagccaaatcaattgcaaaaagcttgggacgcaaattcgtcagaatctcactcggaggagtacgggacgaatcagagatacgcggacacagacggacctatgtcggagcaatgcctggacgtattattcaagggatgaaaaaagcgggcaagctgaatccggtcttcttattagacgaaattgacaaaatgtcatctgattttagaggagacccatcatccgctatgcttgaagtgcttgatccagagcaaaacagcagcttcagtgatcactatattgaagaaacctttgatttatccaaagtgctgtttatcgcaacggcaaacaatttggccacaatcccgggcccgctcagagacagaatggaaattattaatatcgcaggctacacagaaatagaaaaacttgaaatcgtaaaggatcacttgcttccaaagcaaatcaaagaacacgggctgaagaaaagcaacctgcagctgcgtgatcaggcgattcttgatattatccgctactatacgagagaagctggtgtgagaagccttgaacgccagcttgccgcgatttgccgtaaagctgcaaaagccattgttgctgaagagcgaaaacggattacggttactgagaagaaccttcaagactttatcggaaaacgtattttcagatatggacaagctgaaacagaggatcaggttggtgtagtgacagggcttgcttatacaaccgttggcggagatacgctgtcgattgaagtatcgctttctccggggaaagggaaattaatcctgacaggaaagctcggagatgttatgagagagtcagctcaggctgcattcagctatgtgcgatccaaaacagaagaacttggcattgaacctgactttcatgagaagtatgatattcatatacatgtaccagagggtgcggtgccaaaagatggtccgtcagctggtattacgatggcaacagcgcttgtttctgctttaacgggacgggcggtttcgcgtgaagtcggcatgactggggaaatcacgcttcgcgggcgcgtgctgccgatcggcggcttaaaggaaaaagcgcttggcgcacatagagcgggattaacgaccattattgcgcctaaagataatgaaaaagatatagaggatattccggaaagcgtcagggaggggctgacatttatattggcgtcccacttagacgaggttttggaacatgccttagtaggagagaagaaatgaaagtcacaaagtcagaaatcgtgatcagtgcagtaaaaccggaacagtaccctgaaggggggcttccggaaatcgcattggccggaagatcgaacgtaggaaaatcgtcttttatcaattcattaatcaatcgcaaaaatcttgcgagaacgtcatcaaagccgggaaaaacacaaacgcttaatttctacattatcaatgatgagctgcattttgtggatgtgccgggctacggttttgccaaagtgtcaaagtctgagcgtgaagcatggggcagaatgattgaaacctatatcacgacacgcgaggaattaaaagctgtggtgcagatcgttgatttgcggcatgcgccatctaatgatgatgtacagatgtatgaatttttaaagtattacggcattcctgttattgttatcgctacaaaggcggataagatcccgaaaggcaaatgggacaaacacgcgaaggttgtccgacaaacattaaatattgatccggaagacgagctaattctcttttcctcagaaacgaaaaagggaaaagacgaagcttggggagcgatcaaaaaaatgataaaccggtagaggatcctctaccggttttatttatcgtatagatttttttcgttttatcaataataacaataaactgattccaataaagacaaacggccaatactccttcagaagcgctgttggaatatgcgcagactcaagccatgccataatttgtttgaaaaagtacaaaaacagggaaaaacaaatcatcgacacagcttcatatacatattcttttttttgaacggctgaaacgagaagtgagaagccgatcataaagaggagcatttcaaaatcatccggccaccatacccatttcggcttggcaaaaaagtgtaagccgatcccgaagagaagcaaaccgatgaagaaatggggtgtaacggcttctttttttccttgatatacaaaggctgcgcctaacagcatgaggagaacaggccattgatcctgccctgaaaacagttcggcttggccgctttctagccatgcatatacagaagcggcaagcagcagacaagggaataaaattgatttttgtttcatgcatatcaccttcttgttttttagagctgatgtgtagtaaatttctgctgtttttggtattgtcaataagaatgtttcttttccctgaagctttttctaatatagcataagaattttaaaatctgttcacattttgtgaaagaaactatgttataattattataaataatgagttctatgttagaatgattataaattaagattgggtgttgggggtgtaattagagcgatgcatatacttgttgtgggagtagattataaatccgcccctattgagatacgtgaaaaagtaagttttcagccgaatgagctggcggaagcaatggtgcagctgaaagaagagaaaagcattcttgaaaacatcattgtctcaacctgcaaccgcactgaaatttatgcggtagtcgaccagctccataccggccgttattatataaaaaagtttttagctgattggtttcaattaagcaaagaagagctgtcaccgttcttaacgttttatgagagcgatgccgctgttgagcatttattccgtgtagcctgcggacttgactctatggtgattggcgaaacgcagattctcggacaggtacgcgacagctttaaaacagctcagcaagaaaaaacgatcgggactatttttaatgagctgtttaagcaggcggttacagtgggcaaacgaactcacgccgaaacagacattggctcaaatgcggtgtcagtaagctatgctgcagttgaacttgccaaaaaaatcttcggaaatctttcaagcaagcacatattgattctcggtgcgggaaaaatgggcgagcttgctgcggaaaacctgcacggacagggaatcggcaaggtcactgtcattaaccgaacgtacttgaaagcgaaggagcttgcagaccgtttctcaggtgaagcgagaagcttgaatcagcttgaaagcgcgcttgcggaggctgatattttaatcagttcaaccggtgcaagtgaatttgtcgtgtccaaagagatgatggaaaacgcgaataagcttcgcaagggacgtccgctgtttatggtcgacattgccgtgcctagagatcttgatccggcgctgaatgatcttgaaggtgtttttctttatgatatcgacgatctggaaggcattgtagaagcgaacatgaaagagcggagagaaacagctgaaaaagttgaactgttaattgaagaaaccattgtggaatttaaacaatggatgaatacacttggtgttgtgccggttatttctgcattgcgcgaaaaggcgcttgccatccagtcagaaacgatggacagcattgagcgtaagctgcctcacttaagcacaagagagaaaaaactgttgaacaaacacaccaaaagtattattaaccaaatgcttcgtgatccgattttaaaggtgaaagagcttgcggcagatgctgattctgaagaaaagctcgcgttgtttatgcagatttttgatattgaagaagctgcgggccgtcaaatgatgaaaaccgttgaaagcagccagaaggtccactcttttaagaaggctgaatcaaaagcgggctttagcccacttgtaagtgagtgaaagctgaatgattgatactgcaatggcaagacttaatgaggggacaatcgtcatttacgcgttaagtgtactcttttattttatagattttcttcaacacaaccggaaggctggaaaaatggccttctggttgctttctattgtctggactctgcaaaccgtgtatttggcctattttatgtgggtgacggggcggtttccggtattaaatgtgacggaggcgctttatttttatgcctgggtgcttgtcacgctgtcactggtgctgacaaagcttttacgtgttgactttatcgtgttttttacaaatgttataggattttctatgatcgccattcacacattttcaccgacagagcagcagtcagctgctttttccgggcagcttgtatccgagcttttggtgattcatattacaatggcgattctttcatacggcgctttttccctttctttcgttttttctgtgctatatatgtttcaatatcatctgctgaaaaagaaaaagtggggaaaatggctgttgagaatagaagatttatctaagcttgattatatggcgtatgttttaaatgtcattggggttccgatgctgctgctgagtttgattctcggcgtcatatgggcatatgtctcactagaaacgctgtattggtttgacgccaaagtgcttggttcgtttgtcgtcctgctgctgtacagctattatctttatatcaggctgattaaagagctgcaaggaaaggtcgctgcactgtggaatacggcttgttttctggtgctgatgatcaattatttcctgcttggaagcctgtcgcaattccattggttcagttaaacgatgtcccaagcagattcgggaggaaagaaatgatgagaacgattaaagtaggttccagacggagcaaactcgctatgactcaaacaaaatgggttattcaaaaactgaaggaaatcaatccttcgtttgtttttgaaattaaagagatcgtgacaaagggcgaccggattgtcgatgttacactctcaaaagtgggtggaaaagggctgtttgtcaaagaaattgaacaggcgcttttaaacgaagagattgatatggcggtgcacagcatgaaggacatgcctgctgttttgcctgaagggcttgtgatcggctgtattcctgaacgggaagacccgcgtgatgcccttatttcaaagaatcgcgtaaagctttcagaaatgaaggaaggtgctgtcattggcacaagcagtttaagaagaagcgcgcagcttttgattgagcgccctgaccttacaattaaatggattagaggtaatatagatacaagacttcaaaagctggaaacagaggattatgacgcgattattttagcggctgccggcctttctagaatggggtggaagcaagatgtcgtaaccgaattccttgagcctgagcgctgtttgcctgctgtggggcagggagccctggcgattgagtgccgagaatcggatgaagagctgttggcgttgttttctcagtttacagatgaatatacaaaacggactgtcttagcggaacgtgcttttttaaacgcgatggagggcggctgccaggttccgatcgcaggctactccgtgttaaatggacaggatgaaattgaaatgacagggcttgtcgcttcacctgacggcaaaatcatttttaaagaaaccgtcaccggaaacgatccggaggaagtaggaaagcgctgtgccgctcttatggctgacagaggagcaaaagatttaattgatcgtgtaaaacgggagcttgatgaggatggaaaatgattttccgttgaaaggaaaaacagtacttgtcacccggaataaggcacaggcaacatcatttcagcaaaaagtggaggcgcttggcggtaaagcggttttaacctctttgattacgtttcgccgcgctttgccgaatgatgttgcggaacaggtaagagaggaccttgccgcgccaggctggcttgtttttacaagtgtgaacggggcagacttctttttttcttatctgaaggaaaatcagcttattctccctgcgcataaaaaaattgcagcagtcggtgaaaaaaccgcccgccgtttacaaacgcataacgtatcggttgatgtgatgccacaggagtatattgctgaacaattggctgacgctcttaagcagcatgctgaaccgggggagcccattaccgtaatgaaagggaatttgtcacgtgatgtgataaaacaagagcttgtcccgctcggttttgaagttaaggaatgggttctctacgaaacgattccagatgaagaaggcatcgaggcactgaaagacgctgcgggtcaatattcctttgactatgtaacatttacgagttcatcaaccgtacatacgtttatgcatgtcttgggagaagaattaaaaaagtggaaggcgaatgggacggcttgtatcagcattgggcctttaacaaatgatgcccttctgacgtacggcatcacatcgcatacgcctgatacatttacaatagatggcatgcttgggttaatgtgcagcatgtcaagagaggaagagagaatatgagtcaatcatttaatagacaccgccgcctgcggtcatcaaaagcaatgagagaaatggtaaaggaaacacgtttgcatccatcagattttatttatccgatttttgtcgttgaagggctggaaggcaaaaaagctgttccgtcaatgcctgatgtttaccatgtatcattagatttattgaaggatgaagtagcggagctggtcaaactgggcattcaatctgttatcgtgttcggcatcccggaagaaaaagatgattgcggaacacaagcgtaccatgatcacggaattgtccaaaaagccatcacagaaattaaagaacacttccctgaaatggttgttgtcgctgacacgtgcctgtgcgaatatacagaccacggccattgcggacttgtcaaagacggggtcatcctcaatgatgaatcgctggagcttttggcgcagacagctgtcagccaagcgaaagcaggtgcggatatcattgcgccatcaaacatgatggacggatttgttacagtgatcagagaagcacttgataaagaaggattcgtcaatattcccatcatgtcttacgctgttaaatattcaagtgagttttacggtccgttccgtgatgcagcaaacagcacaccgcaattcggagaccgcaaaacatatcagatggaccctgccaaccgtatggaggcactccgcgaagcacaatcagatgtcgaagaaggcgcagactttttgattgtcaaaccttcgctttcttatatggatatcatgcgtgacgtaaaaaatgagtttactttgccgctcgtcgcttataatgtaagcggagagtattcaatggtgaaggctgcagcgcagaacggctggatcaaagaaaaagaaattgtgttggaaattttgacaagcatgaagcgcgcgggtgccgacctgattattacgtatcatgcgaaagacgcagcgaaatggcttgcggagtaattttattcagttgacaggagttgaggcagatgagaagctatgaaaaatcaaaaacggcttttaaagaagcgcaaaaactcatgccgggcggtgtgaacagtcccgttcgcgcatttaaatcggtagacatggacccgatttttatggagcgcggaaaaggctcgaaaatctttgatattgacgggaatgaatatattgactacgtcttgtcatgggggcctttaattttagggcatacaaatgaccgcgtcgtagaaagcctcaaaaaagtggctgaatacgggacaagctttggtgctccgactgaagtagaaaatgaactggctaagctcgtcattgatcgtgtgccatctgtagaaattgtacgaatggtaagctccggaacagaggctacaatgagtgccctccgtttggcaaggggctatacgggccgcaacaagattttaaaatttgagggctgctaccacggacacggcgattctctcttgattaaagctggttcaggtgttgccactctcggtctgcctgacagcccgggggtgcctgaaggcattgcgaaaaacaccatcaccgttccgtacaatgatttagaaagtgtaaagcttgctttccagcaattcggtgaagacattgcgggagtcattgtagagccagttgccggaaatatgggtgttgttccgccgcaagaaggcttcctgcagggtctgcgtgatatcactgagcagtacggctccctgctgatttttgatgaggtgatgacaggcttccgggtcgattataactgcgctcaaggttacttcggcgtaacgcctgatctgacttgtttaggaaaagtaatcgggggcggacttcctgtcggcgcttatggcggaaaggcagaaatcatggagcagatcgctccaagcggtccgatctatcaagctggtacattgtcaggcaacccgcttgcgatgacggctggcttagagacattgaaacagctgacacctgaatcctacaagaatttcatcaaaaaaggcgacaggctggaagaaggaatttcaaaagccgccgaggctcatggtattccgcatacctttaaccgtgcaggttcgatgatcggtttcttctttactaacgaaccagtcattaattatggaacagcgaaatcatctgatttgaagctgttcgcaagctattataaagggatggcaaatgaaggggtattccttccgccatcacaattcgaaggtcttttcctctcaacggcccatactgatgaagatattgaaaacacaatccaggcagctgagaaagtatttgctgagatcagccgcagataagagtgaaaaccggtatcaaggactccttgtgccggttttttcgtgctctcccactcatattttctccagttcatacatacacctttagtgacatctaattttaaggattagatgaaaggaggatatgaacttgccgcaaaatcatcgattgcaattttctgtagaagaatcgatctgtttccaaaaaggacaggaagtttctgaactgctttctatttcattagatcctgatattagggttcaggaagtaaatgattatgtatcaatcataggatcgcttgaacttacaggtgagtacaacatagatcaaaacaaacataccgaagagatttatacagataagcgatttgttgaacaagtcagaaagagagaggatggaagtgcggaactgactcactgttttcctgtggatattaccattccgaaaaataaagtgagccatttacaggatgtcttcgtctttattgacgcatttgactatcaattgacggattcgcgcattttaacaattcaagctgatttagcgatcgaagggcttttggacgatacgcaagacaaagagccggagatacctttatatgaagctcctgcggcattcagggaggaagagctttcagagccgtcggcacatagtgtagtagaagaaccgggtgcatcatcggcagaggaagcagttcttcagcatgaaccgccagccgaaccgccagaactttttatctcgaaagcgggcctccgtgaagaactggagacagaaaaagcagaatctgagccgcctgaatcggttgcttcagaaccagaggccagagaagatgtgaaagaggaagaagagtcagaagagcttgctgtgccggaaacggaggttcgtgctgaatcggaaacagaagaatctgagccagaacctgatccttcagaaatagagattcaagagatcgttaaagcaaaaaaagaaacggctgagccggcagctgcaatagcggatgttcgtgaagaagcagactctccagcggagactgagcttcgtgaacacgccggagcagaagaatcgcctgctttggaagctgaacttcattcagagactgtgattgcagaggaaaaagaggaaacaacagagtctcctaatcatgaatatgcgctgcgccaagaggctcaaaatgaagaagcagctcaatcggatcaggctgatcctgcgctttgccaagaagaggcggaagcggatgaagctttggagagtgtatcagaggccgctctctccatagaagatagcagagaaacagcttcagctgtatatgtggagaatgacaaagccgatttccatttccatcaaaaaacaagctcggaggaggcatctcaagaagaattgcctgaaccggcataccgtaccttcctgcctgaacaagaagaggaggattctttttattcagcgcctaagctgctggaggaggaagaacaagaggaagagagcttcgaaattgaagtgagaaaaacaccatcagctgaagagcctaaggaagaaacaccttttcaatcctttcagctgcctgaatcttctgagactgaaaggaaggaaacggatgctgttcctagggttgctcctgctgctgaaacgaaggaacctcaaacaaaggaaagtgataattctctttatttaacaaaactctttacaaaagaagcggatgagttttcgagaatgaaaatttgtattgtgcagcaggaagatacgatcgagcgtttatgcgaacggtatgaaattacatcccagcagctgatcaggatgaattctttagccttggatgatgaattaaaagcaggacagattctctatattcctcaatataaaaatagccatgcgtaaaccgtaagcgatcggaaaatgtggtgaatgaaatggaagatacccaatcggttcttcaggaatacggactgactgctcaatttattgagcctgtcagtcctcttgtttggaaagtgtatacagactacggcatatttgccctgaaaaaattgaaagaaggtcgcggcaagcattttacagatcatatggtggcgattgaggaaaaaggctttcgttcattcgttcccgtttacagaacaaatagcggtgagtttttctcagcaggcatacaatacggagatacctactatttaatgccttggctccaatttgaccaagaggaagaacgggatcagaaacatgcttatttatttagagaaacagcccgtcttcacgagagaaccgcgcaggaactaaaggttagacgtgatgagattgaacgttattacgggcaaacgaaaaaaaagtgggaacaagataaaattttctatgagcagtttgtggatagagcggagaaggagtggtacctttctccttttgaactccaggccataacctatttttcagaaaccatttccgcggtgaattttgcgctggaacggttggaggactggtatgagtctgcaaaggaaaaagacgtttcaagggttgtaatgaaccacggcagcctgtctatacaccattttctgtataatgatgccgggaccggatattttacaaacttcgaaagagcatctgtcggtccgccgcaaaacgacctgctcggcttttatacaaaaatgttcagaggctttccgaaagcttgtccggaatgcgtcgaatggttttatggatatacgaaatcattccctttgcgtgaagcggaagtcagcctttttctcagctatatggcatatccggcagccatgtacaaggtgctgaacggttatcaaactgggaaaagacagcatgaaaaagaggaatgtacacaattattaaaggcttattggcaaatgaaaaatatagagccgtttgtgatgaaaatccatcagattgaacaagagaaaaaatttcaggctgaaaacgagtccacgtcttaatggcgcggacttgtttgtttatatccattctaaatgaagggcgcaagctaaaaagattaggattgcgagcagcaaaacatcaaaggttgtcggaaagaaaatggttctgattccttgaaaaatcgtaatgggaataatcacttgtgcggatacaagccgaatttgccttacccatggcggcagcgaataagagctgaaacgtttcttcacggtgcatcctcctctacgcatttacaagcatcatatgtaaacttgggcaataggtgcctgcccatctgtatagaaagcggtgtttttggaaaagatgattgacgaatcaaaaacacttttactataataaagaacataaataatgtatacaatgagctgataaatacacctgcttagaacgggaagagtacaaaaaaggcgcatgcagagagagaagccgtttgctgaaaggcttcttatgttgtctgattggaaggtcgcccgggagcataatttcttgaaagaagagtagagaaattcgggaaacacccgttatccgttataagtgcatgaactgatagagttcatgaaaaaaggtggtaccgcgaaagagcttttcgtccttttacagggatgaagagctcttttttcgttctcagccatttttaaacatgctggagggttatgatggaaacgaatgaacaaacaatgccgacgaaatatgatccggcagcggttgaaaaagaccgatatgatttttggctaaaaggcaaattttttgaagcgggcagtgaccagacaaaagagccatactctgttgtcatcccgccgccaaacgtaacaggaagacttcaccttggccacgcatgggacacaacgctgcaagacattgtaacaagaatgaaacgcatgcagggctatgatgtgctgtggcttcctggcatggaccacgccggcatcgcgacacaggctaaagtagaggcgaaacttcgtgaagaaggcaaatcccgctacgatttaggccgtgaaaaattcctcgaagaaacgtggaagtggaaggaagaatatgctgactttattcgcagccagtgggcgaaattaggtcttggcctagattattcccgtgaacgttttacgctggatgaaggcttgagcaaagcggtaagggaagtattcgttaagctttatgaaaaaggcctgatctacagaggcgaatatattattaactgggacccagcgacaaaaacagccctatccgacattgaggtgatttacaaggatgttcaaggcgcattctatcatatgagctatccgcttgctgacggttcaggctcaattgaaattgcgacgacacgtcctgaaacaatgctcggtgatacagctgttgccgttcaccctgaagacgagcgctataaacaccttatcggaaaaacggtgatcctgccgattgtaaatcgtgaaattccgattgtcggtgatgactatgttgatatggaatttggttcaggtgccgtgaaaattacgcctgctcatgatccgaacgacttcgagcttggcaaccgccacaatttagaacgcatccttgtcatgaatgaagatggcacgatgaatgaaaatgcgctccaatatcaaggtatggatcgttttgaatgccgcaaaaagctcgtgaaagatttacaggaggcgggagttctcttcaagatcgaggatcatatgcactctgtcggccatagtgaacgaagcggggctgttgtggagccttatctttctacacaatggtttgtgcgcatgcagccgcttgctgatgcagcgattgagctgcaaaaaaaagaagaaaaggtcaactttgtgcctgaccgtttcgaaaaaacgtatttacactggatggaaaatatccgcgactggtgtatctcccgtcaattgtggtggggccatcgtattcctgcctggtatcataaagaaacaggcgagctatatgtcggacttgaagcgccggaagacagcgaaaattgggaacaggatacagacgtactggatacatggttcagttctgcgctatggcctttctccacaatgggctggcctgatgtaacggctgaagactttaaacgctactatccgacagatgttctcgtgacagggtacgatatcattttcttctgggtatcacgcatgattttccaaggcattgaatttacaggcgagcgcccgttcaaagatgttttaatccacggcttaatccgtgacgagcaaggccggaaaatgagtaaatctcttggcaacggtgtcgacccgatggatgtgattgacaagtacggagccgattctctgcgttatttccttgcgactggaagctctcctggccaggatctgcgcttcagctatgaaaaagtggaatcgacctggaattttgccaataaaatttggaacgcctcccgttttgcattaatgaatatggatggcatgacgtacgatgagcttgatctgtcaggcgaaaaatcagtcgctgacaagtgggttttaacgcgattaaatgaaacgatcgagcacgtgacccagcttgctgatcgatatgaatttggtgaagtaggacgccatttatataactttatttgggacgatttctgtgattggtatattgaaatggcgaagcttccgctttatggggaagacgaagcggctaagaaaactacccgttccatccttgcttacgtacttgatcaaacgatgcgtctgctccatccgtttatgccattcttaacggaggaaatttggcagcaccttcctcatcaaggggaatcgattacagtaagtcaatggcctgtagtagtgcaggagcataccgatactgaagcggcagctgacatgaagcttcttgttgagctgatccgttctgtgcgcaatatccgtagtgaagtcaatacgccaatgagcaagcaggttgaactgtacattaaaacaagcacagacgaaatagcagcccgcctcgaagcgaaccgttcatatgttgaacgctttacgaatccgagcgtgcttaaaattggcaccgatattgaggctgttgataaggcgatgacggccgttgtctcaggagcagaggttattcttccgcttgaaggcttaatcaatattgatgaagaaattgcccgtctgcaaaaagaatttgataaactgacaaaagaagttgagcgtgtccaaaagaaacttggaaatgaaggatttatgaaaaaagcgcctgcacacgtaattgatgaggaacgtgaaaaagaaaaagattatgtggcaaagcgtgacgctgttcaaaaacgaatggctgagctgaagggttaatgaaaagccggggcggtttctagagaaaccgccttgtcttataaaagaggggattatcattgtttactgcatatcaagatgcgcgcagctggattcacgggaggctgaaattcggggtgaagcccggacttggccgaatgaaacagctgatggcgcggttaggacatcctgaaaaaaaaatccgagcgttccacgttgcaggaacaaacggtaaaggatcaactgtcgcttttatccgttctatgctgcaggaagccggatatacggttggaacatttacatcgccttatattattacgtttaatgaacggatcagcgtaaacgggataccgatttcagatgaggaatggacagcactcgtcaatcaaatgaaaccgcacgttgaagcccttgatcaaacggaatacggacagccgacagaatttgaaattatgacggcctgtgcatttttatattttgcagaatttcataaggtcgattttgttatttttgaaacaggtttgggcggtagattcgattctactaatgtggttgaaccgctcttaactgtgattacaagcatcggacacgatcatatgaacattttgggaaacaccattgaagaaattgcaggagaaaaggccggcattattaaagaaggtattccaatcgttacagcagttacccagccggaagctttacaggtcatccgccacgaagctcaacggcatgctgcgccgttccagtcattgcatgatgcatgtgttattttcaatgaagaggctctgcctgcaggagaacagttttcattcaaaacggaagagaaatgctatgaagatattcggacatctctgattggcacccatcaaagacaaaatgctgctttgtccattttggctgcggagtggctcaataaggagaatatcgcccatatcagtgacgaagcgttaaggagcgggcttgtgaaggctgcttggccgggacggttagagcttgttcaggaacatcctccggtatatttagacggtgcgcataacgaagaaggtgttgaaaagctggcggaaacgatgaagcagcgtttcgccaattcacgcatttctgtggtgtttagcgcgttaaaggacaaaccgtatcagaacatgattaaaagactggaaaccattgctcatgcgattcattttgcttcttttgatttcccgcgtgcttcccttgcaaaagatctctatgatgcaagtgaaatcagcaataaaagctggagtgaagatccagacgatgtgatcaaattcatagaaagtaaaaagggctcaaatgaaattgtgctgattaccggatctctttactttatttctgacattcgaaaaaggttgaaataaaagtatccggctccggcagaatcaaaaaaaagattctgccggtttttttatgtgtaaaattgaatatctccaattggagctcaggatgctcattttgctacaatccataccagaactcagtgagtaaaggtgtgttgtctatgctatcccttctttttatcttcgggcttatccttggttctttttactatacggccgggtgccgtatccccttacatctatctattattgcgccccgttcatcatgcccgttttgccggaggacattaactcctgcagaattaattcccatcctgtcattcctatttcaaaaaggtaaatgtaaaagctgcgggcataggatttcttttatgtatcccgcagcagagcttgtgacagcgtgtttatttgccgccgcaggaatacgctttggcacgtcgctggaactgtttcccgctgtggtgtttatctctcttctcattattgttgcagtgacagatattcattttatgctgattccaaatcgtatattgattttctttcttccctttttggcggccgcgagattgatttctccgcttgattcctggtatgcaggcctgttaggtgcggcagccggatttctatttctggctgtaattgccgcaatcacccatgggggagtagggggaggagatattaaattatttgcggtgattggctttgtgcttggtgtgaaaatgctggcagctgcctttttcttttctgttttgataggtgcattatatggagcggcagccgttctgactggtagactcgctaaaaggcagccgcttccctttgcccccgctatagccgcagggagcattttagcctatttatacggtgactctatcatttctttttatatcaaaatggcattgggctgactgctgaaaaatttgacgaacgttttttggacaaggcgacaaaagtcttgttctttttttctttgcctgtgctaaagtgtgtagcatgaaaagccgacaagaacggtcaagcaaatgaagggaggaagcggaattgaaaaaaagaaagaataaaaaaaacagtaaagccgcagaaaaagccctcaaggtgacgattaatggaaaagaagagacggtttacgaacaagagacgcctgagacagaggcggataaaagcatgacattttcaaattgggaggaaaaaagacaggcagaacaagaggttgcggcatcccaggaacatcctgatgaagatgaattcaattgggattcagaggaagacaaggtgtttaaagaggacccaaaagttgttcctccttttcaaaagaaaaaaacaaagctttatgcaaaaggaaagaccggggctgccaaaccggtaaaaagagtggccgcgacgattgccttcgcggctgtcattggcactggattagggctattcgcgttaaacatatcggggaataaagaagcgtcagcaccggcctctttagaggattctctaggcagccaaacggcaaaagcaggggatacttcaactgataaacaaacttcaggcacagaaaaacaagcggcgcaaactgaaggtacatataaaacatacgctgtacaagccggaaaattttcaaatgaaaagggtgccgaaacgttaacagaacaattgaccgaaaaaggatattccgccgtgtcactgtcaaaggatgacgggtatacgtatgtcatcgcgggcttagccagtgataaggatgtctcacagcagttaggacaggttttaatcgacagtgattttgaagcctggggaggcaaggagctttccttatcaatagagtcagatatgacagattcttttaaggaaacagcggagcttgcagcaaaggcgattctcggcgaagacattacaaaagcgagtgtagagaaaatagaaaagtctcttggtgaaacaaaagcgtcagaaacaggagagaaaaaagcgattttgcaggctttaaaggaattagaggatccaagtgctgaagccgggtggaaggctcagcaggagctgttagccgtcgttaaataagagatagcaccctgagccttcgtcctttagtgacaggctttttttattttgtcatgaaaaagttatttttctgaaattgtgacaagcctcgtgatttggtaggataaacgagtatctttttttcttaagcaaaccctgaaaggatgacgaacatgacaaaaccgctaatacttgcatcacaatctccgcgcaggaaagaactcctcgatcttctccagctgccctactccattattgtcagtgaagtagaagaaaaattaaatcgaaacttttcaccagaagaaaacgtccaatggttggcaaaacaaaaagctaaggctgtagctgatctccacccgcatgcaatcgttatcggcgctgatacaatggtatgccttgacggcgaatgccttggcaaaccgcaggatcaagaagaagctgcatccatgctgcggaggctttcaggccgaagtcactcagttataaccgcggtcagcattcaagctgaaaatcacagcgagactttttatgataagacagaagttgcgttttggtccctcagtgaagaagagatttggacgtatattgaaacaaaagagccgatggataaagcaggtgcatacggcatccaaggaagaggcgcgctttttgtaaagaaaatagacggagattattattcagtcatgggccttcctatatcaaaaacaatgagagctcttcgccattttgatataagggcatgacggttctataaacgggaagggaaagaaaaggagtgcttggtcatacacgatctgccattaaaactcaaagatttcccaatgaaagaaaagccaagagaacggctcctgaaagtcggagccgagaacttagcgaatcatgaacttttggctatattattgcggacagggactaaacacgaatctgttttggacctgtcaaaccggctgctgcgctcatttgacgggctgcgtctgctcaaggaagcatcggttgaagagctgtcaagcatcccgggaatcggtatggtaaaagcgattcaaatactggctgcagttgagcttggaagccggattcataaattagccaacgaagaacatttcgttattcgctccccggaagacggcgctaatcttgtcatggaggatatgcgctttttaacccaggagcattttgtctgctcatactttacataaatactaataaaattggatgtctaaaatcttgattttacggtctttcttctcaaattcaatttgttttattaattcttggactgtttgtcttttctcttcgcttgtcaagacagaccagctttctttaaacatagttacaatttctttagcacgctcaatatcaataggatttttaggtttatgaaaagcttgctcttgttccaggtcagcttgcgctttttgcagagcatcttttgtttctgccattagctgctcaaactcttgatctgtcattaaatccatagaccaagctttttgatacttttttctttgtttttcaatactgattattttttgatgaagcttatcatagtcctgctgtttctcttccggtattatcggttcgagtcttggtttcacattctgcatatactcaattaaagctctttcgaattttttttcgctgcctccgattgtagggcgtttattcaaaagacaggcttggcatctatagtgattactttctacgtgcttattgtctcttttcctgaaatacttagagcgctcacttgtgagtcggtttccacaattggggcaaattatttttgtttggaatataaaaattgagtaggtttctcttttcttaaaattttgccgatcgtgtaatattttttgtagctgatcaaattcctctttagagatatagccttcaaaagcatcttcaattatttcatcaccccaccgaaaagcgccgtacaatactggatttttcaacattactagtatagaggctatatgccatttataacccctttttggaacagcgtctgattcgtcgagataatcagctaattcccttagtgaataaccttttttaatcttatcaatcatatctaaaagtatttcaccctctttaggattcttgaccaggtactcgccttctttcgtaaaaccaaatggagcaggggcactgtattgtccctgtcgagccttctcaacttgtcccatttttacccgttcccctaaattctctctttcccattgagccatagcagcaactaacgtgataaaaagcctgccagttgctgatcctgtatcatagacctcagtggcggacctgaaaacggcattgtacttgtcaaagtagtctaaaagagagtagaggtcacgaacagacctggtcaacctgtcgagcctatatactagaactgtgttaatgataccttgttctatgtgtctgagcattaattccagtgaaggcctatgtatatctttagctgattttccttcgtctatataaaatttgtagtttgcccatccttgggaaacgcaataggctttcagtttttccttttgggcagcgattgaatagccttctttcgcttgttcttctgtcgaaaccctaacgtatattccaacattcttatggctgttcgcttccattagttccaattgaaacatcctcctagaaacgtatgttctgttttgaggttaaaaatttttaacccccgataaatcttttaaatgtgctaactctgctggcaccccattcatcacagcaacgtcttttagggtaaagtttgtagttttatactggcttataacccagtcaggaagaagaagttcaacggcaaaagtatttgcctcaacttcgaccttatcaactgagaaaagagtatgttctttcatgaaaggggtattagcgcgagggtgcaattgtgcgtgccccagttcatgagaacagacaaatgttttttcaccttggcttaagttagaattgataacgatatatttgtttcttttgtcgtatttataaaaccccattatttcatggtgtaagtcccattgaaaaacattgatatttaaatatgatgcaagttcataaggattactggttttatactttttaattagtttttgcacagctgcttttatcaaagtataaggccccctagtcttgatcgtcttttctgtatttctttggagtgtatttcttattgattctttgcgtttgacggacgatgtgttccattgcttccatgagggactcaatggcttcagggctcataggctcgccagagaagcttagtccatccgagttctctaagtcccttcttatttcctccatacgctttgcaatgtctttttcttctttagcgttatattctacaggctcttcttttataaggttttcttcaccaacaattgcagagacctgcacaccgagtgcacctgctacagattccaaggtggaaaggctggggttatatctatctctttcaatatctgcaaggtatgaacgagaaagattagctttgtcagccagttgtacttgagttaacttccgttccttcctaatagctttaattctttgccctacagtcattatcggttatctcctttacaacacagtggacctcactgcattacacgagcttacacgaggttacacgagtcgtttgttatgtcccaattatagtgcccgaatgtcggaaatacaataccaaaaatgacggaaatacaagtattttttagcaaaatgacggaaatacaagctaaatactctctaaatcttcaaaatgcttgattttcgtcatatttcgacttttacaaaatgtcgtgaataccgtacaatttagccataccttaacgggaggtgataaacatgctggatgggaaaaagcttggagctttaattaaaaacaaacggaaagaaaagcacttgaaacagacagaaatggcgaaggcgctaggcttgtcaaggacttatctttctgacattgaaaacggaagatatctgccaagtacaaagacactttccagaatagcgatttttataaatctggatttaaatgtgttaaaaatgacggaaatacaagtagttgaggagggtggatatgatagagctgccagcacatgtagaagccaggctttatgaaattttcatgaagttatcggttccaaggattctcgaaaaagaggcattggagaaaggagacaaatcaaatgacgaaagaaaaggcaattgaacttgcagccttcttcgctgaatttgagcagaagatgatcaaaaagaaccgatttaaaattgctcatttctctaacaaacaaatgatcaaatgttgtcatgtctatttagaaatgaagggagtaaaagcatgaatctaaatcaatttcttaaatcagataaggaaaaagctaaacgtaaattggcatccgcacagtttctgctgaacgaattgcttccagatgaaatagaggataacaatttcgatgaatgtattgatctctgtttgtcagctgctgaaatgttcaaggaaatcaaacggatgcatcatcctgaacaagtcgttcagctacatgaagttgcaactcaatttcttagtaaaggtcttgatgtctcaatcgtaaagaggcctgtatatgaatcttgagcatccgatcataacggaaattaatcgttacggttatccaaaagagtatctccagtatgaccgggatcgggaagaggatgccgatgaagaagtaaataaaaaaagcccacacggcaatgtggactaaaaacaaacaagcaacttcattttaaatggaactctcaacaaaatcaaatagaggaaggtgtctcatatgaatccattacaggactttgaactaaatgaaattaataacggcgaactgccgggggaccgtccacagtttgaaatcactgatatgaacagcctgaactgggctttccggaaaatagctgctcttaagtcgcaggaaaaggaaatcaaagcgctggcagccacagaaaagcaacgtattgaagagtgggaaaggcaggagcttaagcctttagctgacagtctttcattctttgaaaacttggttagtgtttatcatacaaagcagctgcaggatgatcctaaggtaaaaacactttccacaccttatgggaaatcaaaaagccggacaacaaaagcagcgcctaaagaagtggataaggaaaaacttctgcaacatgtgaaggatgccggtatggaagagtttataaaagagtctgtggcatggggtgatcttaaaaagacactcactgtcaccgagcttgaaggtaaaccaatcgtaattgattcaaatggacaggctgtcccaggcgtggaagtgcagccggaaacagtcagcttcaaagtggaggtgtaagggatgtttcaagtaacagacgcgcagcgtcaaaaggaaaaagcaattgtgggatttatcggtccaagtggctccggtaaaacagccggtgccctgctggtagcttacggaatgatgcgtgaggcatacccagaagcaagcgacgatgtaatctggtcgaagatcggcgtcgttgataccgagcatcgacgcgcaaaactgtacgctaatttgcagtttgatgaaattcgcatcggcagctttaagcatattgattttacaccgccatatacgacagaacgatatcaaatggcagtcgaagcaataaagaacgccggtgccgaagttgtcgtaattgattcactctcacacaactggcagggtgaaggcggaatagttgaaacacatggcagcatgtccggcaactcgtttcaaaactggggcaaacttgcgccggaaacaaccaaacttattaagacgttaacacaaaatgacgttcacatcttggcgacattgagaacaaaaacggagtatgtagtggagcctgataataacggcaaaatggctccgcgtaaggttggaacaaaacctgtacagaaagatgaaatggaatacgagtttatgctcaacttcaatattgatattgatcatatggctgagacgtcaaaagacaatacgcggatgtttgaaggctcttcaatcaagctaaacccagaagtcggccgcaaactttatcagtggcttgagcttggcattgacgtaaaggcggaagaagaaacagagcgcatcggcttgattactcacatcaaaatgatgattgatggcaacgaaaaggctgcgcaaatgattgaggagttccagatcaaagctaatcagaagctagaacaatggaatatcaaacttgctaatgctgctattgatagattaaacagcgttttgggaggtgagccaggtgaaaaatgattcaaagctcgaagagattcgggggcatgcgactatatctgatgtgccctggttaatttcagagattgatagattgaatagtggcatagacagtgtaatttatgatttgcgaaatgaagacatcaccgatccgcatgtagtggattcaattactcaaaatcttgtagctgtactaaacggcaaataaacaaaaattggaggaattaaatatgttcacagtagaccacagcaaaggcgaagcttttgaaccaattaagccaggagaatatgaggcaacggttattaattttgaggagaaaacagcagcttcatccggaaataagcgacttgtcgtagattatgaaattcgttctgacgttgaacaggcatgccagggccagaaaatcctatacgacaatttcactgttacagataatgcgatgtggagatttcatcaagcatcaaaggccgcgggcttcccgaacggaatgaaatttaaggatcatattgaatgggccaatgctttcctcaataaaccgatccgcctagttgtcggggaaagagagcacaacggcaaaaaatatccagaagttaaagcgtttaagccgtcagaagcgccggcgccagataccggctcaattacagtgagcgatgacgatgtaccattttgatcacaagaaatacatttgagggagtgtatggctccctcgtttttaaaggggagttaatacatgtacgattttaaaaatataccgcaagagctaaaaaacgcccctcagtggattctatggcgttcggaagagcgtaacggcaaaaaaacgaaagtgccatatcagattgacggcagcatggctcaatcaagcaataagagaacctggtccacctttgccactattatgaagtttttcaatgaacaggagtatgacggcatcggcttcatgttttctaaagatgatccgttcatcggaatagatatagatcattgtgtaaatgacggtgttctatctcctttcgctcaggaaatcatccagacaatcaacagctatactgaatactccccgagtggtgagggtgttcatattatcgcgaaaggtaagctcccattacgcggaccgggcacagggagaaaaaatatagataaaggcctggaagtatacaggcatggtcgttatttcacgttcaccggaaacagtcttgatgttggacctgtgcaggaacgatcggaagagatcaaaaccatctttgataaatatctaacagagagggaagaagcaaaatcagtcagcgcccgttcacaatcaggaagcgatatgagtaatctttcaaataaagaaatttgggaaagaatgttcaacagtaaaaatggaaaaagcattcaggacctttttaacggccagctgattaatggcgatcattcttctacagatatggctttatgtaatcacttggcattctggacagataaggatgcaactaaaatggattccatgtttcgcgaatcaaatttgttccgcgaaaagtgggatcggcagcattcagctgatggggctacatatggagaaatgactattgctgcagctatctactcgaccggccccacaatatccgacctgatagagcagcaagagcagccgtatgaagtgtatttctcgcagccgcaggcctcacaggttgctgacacagaggaaatcatagacacgccaccggtctttcacctgactgagctaggcaacgctgaaaggcttgtatattaccatggcaagaatatcagatactgtaatgagcttgactggttaatctggaacggcaagatgtgggaggaagacagcaagaggcagatcgaggcattaactgcccaaaccctccgggccatttacggggaagcgaaagccacggaagatggttacagaaaaaagcagcttaacgattgggctaaaaaatgtgagcgtcgcaatatccgaatgaacaccatcctggatacccggccaatggttgctgtaagaaaacaagaactcgactctcataaatatctgtttaattgtgagaatggtgtgatcgatttaaagactggtgaattgttgccgcatgatcgtgattttctgtttactaaaatttcatcagtagcttatcaaaaggatgccgattgcccaaactggaaagcattcttagaaagcatatttatagatgaacaagggcaaccaaactatgaaattattgattttatgcagaaagctattggctattcattgaccggcgatactactgaacaagtcatgttctttctgtttggtaatggccgtaatggtaaatcaacgtttatcaatacagttcagcaactgttgggcgactatggtcggcagacgaacagcgacacattcataaaaaagaagaatgatagcagtattaacaatgacatagcccgactcgacggggcgcgctttgtgtcggccgttgagagtgaagaaggtcagcagctgtccgagtcgttggtgaagcagatcaccggaggagaaaagatgtccgcgcgattcttgcgccaggagtattttgagtttacgccagaatttaaagtgttctttacgacaaaccataaaccaattgtaaagggcagcgatgagggtatttggcgtcgtatccgtcttgtaccattcactgttactattccgaaagaaaaagtggacaaaaagctcccgcagaaacttgctgcagaaatgcctggcattctccgatgggcagtagaaggctgcttgaagtggcagaaggaagggcttaaggaaccagaagtgatccgaaaagcaacggaaggttaccgcgaggatatggatattctcggaccatacatggaggaaagatgcatcctgcatccgactacaaaagtagaggctaaggagctttataaagactacaaagactggtgttttgagaatgatgagattgaattgaagaatcgtgcgttttatcgacaacttgaaatccgtggatttaaaaagtaccgcggtaactataacaaaaattattttgatggaattggcttaataaaagaaaaccgagatttatacaaacaattaaatctatttaaacacgatcagaataaatcagatttaaaaagtaacaaaaataacgtcacaagtattcaaaggaaaaagctataagcattggtatgacaagggttctgagtgttttgttaatatatggtgttacttttgttacttaaaaaccctgttcctctcacatgaaaattaattaataaaaataatatatatatactatatagccttaaatataaaaatgagtaacaaaagtaacaagagggacttgatcccttgggagagtaagggtgagctgtgttacttaaaaagtaacaaaaagtatcaaataaggtgtgagtaatttgcatccaaaaaaaatatgctctgatatggcgtttttgggatcacctttaatacttgatggaaacgatctttatattgagaatcctgagaaagcctatccggagcttgaggcgtttgtccaatcttataaaaagcgaattatccggtatttaaaaggtgaatactcggatcatgaacataatgtgaaacagacaatagataaaatcattaattatttcatgggcattgatcaagagattaataaaaaaatagatgactggttcaatcatgattatgaatcagttatgaaggtgatgaaattgcttgttctcttttgggagaacggctggagggagctaaaggaatccgtttcaaactttgaaagtgaggaaacggaccggctttccatagaaatttatgatcgggccatgtcgtattttaaggggaagaaagcatgacaattattcactataactattcggaaactgagttaaaagagattctggacagcatgatcattattgtggatacgagggagcaaaagaatcagcatgttcttgattatctccgtaaaaagaaagtggcaatcaagttcaaagggatgaaaacgggcgattactcggccatgattcccaagaatgatgaatttggaatcagccgtgatatgtatttgaatgcagccattgaacgaaaaaacggagtggacgagctggtgcagtcaattaaagaccgttctcgttttgaaaatgaattgatcagagcgtccagacatccgttcactcttcttgtggaagacctggaaggataccaaaagatactcaacggaaaatatcgttcaaagtatgaaccgaaagcactgctgggcagcttaaaaacatttgaggttcgttacggtttttcaactgtttttctcagccctaacgctaccggaaattacatttatcatcactttcattatatggcccgggaactgctgaaaggcggacttttgtaaatctgaataaaacaatcaaagggaggaagtaacatggcatttgtaggttttgaggaatcgaaggaagtacggcagctggctgaaagcataattgatgaacaccatccacatttaaaagacgctaaacagcagattggtttttatctccgtgaaggtaacagcaaatgggcaggaaaggcgaagaaatgcactgcttttgaacgccatatgacggattatatgctattcgtgtttatcaataaggctgcatggaagacgatgccggaggaacaacgcgctgctctggtagatcatgagctttgtcattttactcgagaagaatgggaagagcctgacccgaaagaccaaagtaagtgggtgaccgtatacggcgccgccactgatccagacagctggggaattcgtgaacatgacgttgaggaattctctgagattatcgaacgccatggtttatgggataccggcattgaaacatttgccgaagctgtccgggaggcagatcatcaaatgactatttcagacgtgcagcgtctatcgagggtgaaataaatgggggtagttagaaactatcttttaggggattttgcatacatcgaaaccgaacgtgagttcgttttggtgataaaaaataaaatttacggtccgtatgataacagtaaatttaaagccattttgtatgcgttggaatgtggcttgaaaggtcaaaggaatttggaggattcgaagtgagaaagccaacagaaaaacagttgagattgatcagactcatggaacaatttataaatgaaaaattcaccggtaatacaattacggaagcaagcgaatttatcgctaaacatatggatgaataccaagaagagaaagaaatggcggacgaatcaaacgttttatatgatgatatttattttgaagaaggttggtaaagcaatatgaatggagaacctcggagtaagctaaggcaagatttgatcaaaaaagcacggtcttttcatgttcccggacatggcccggactttgaaaaaatgacgaatgatcagataaaaaagcatattgagataatcgacggtacattcaaaatgctttttgacaaggatgataaggagggcgcagaatgaatgacttccaagaaagaaaacaatttttagagaagtactatcaggagtttaagtcactgcaagagattaatcccaacacgtctttagatgaaagaatatcattgttctgcgctgcctttccagaagcaaagccgcacagaaactatttttatcaaagggctttgaaggagggcgcggagtgagtgaaatagttccctgtatcaaatgtggaaagatgacggatgcagatataacgatgtgttgtgatggctacatgtgcggttgtatggggcttcctattcaccctcctttatgtgaagagtgcgaaaagacattttttaaggaggatgcaaaatgaaaaagattattttagctttagttgctgtcattacattgggggttatggtactaccggaaagtgcttcggcggcattgtcaggctatcaaacaagcaagaaagtaagagtgtatacagacgccacaacatactcaaagagtgctacatccgtagactggaaggcgcagaaaacaacgtcagggaaggtttattattcagctatgctcgtgcgtactgacaattacagtaattccgggacacaacgcggcagttttacatccggcacaccattaaagaaattcagcttatcgaaaacgcgtccgggaacgtatcaggttgtcgtgaatatctacagtgattcagccgagcgtcattacatcggaacggcgagatcagcgaaaatttatatcagacgataaggagcgagggaaatgaaagcgattgaaaaggatggtaatgacacagtggacattataaaatgtcctcactgtgagcatttaatggcatatgacgacttgatcgatgtagggtatatgtccggtaattttgatatggattgcgagaaatgtaaaaaggctttcaatgtggattttaccagtatgtattatttcacgactactaaaaagatggagtgccggagtgatgtttaaactgttttatcacaggtacggaaaaattaatctctcagagtgtcaaactagagaagaagcttaccgcgaagctaattacattaccgactatgaagttggctttgtagattgtataacagatgaaaataacgtgattatatatgacggattgcaaaatgtaatcggagtaacttcgaaccgaaaaggcgaagtttatgaagtggaggacgcgaaacgatgcttaaattgacagaagaacagtacaatgcattctgtacattgttaggaataggaaacaatgatgaagtattagaggaattgtatgcaagtcatggcagttgggaaccggatcaaaacccacaattcgcacttttaaatgatttggacagagggaatcttgctgaagcagtaataaagggtaatttcgagaggattcctacgccgatagagaaggttgacaagttgatagagtcatacagcaggcgtggcgagcttctatcaggaattgcaaaagacaccgtgcaggatatagtcacagagttaaatgatttgaaagaagtcattaaattttcggaggatgcagggtgattatttatatagtagctgctctcttcatgtttaattcagttgcacttctcttatgggtttgcttcacggaaagccgaatacaaaaatgggaacaagaaaaatagaggaaaggaggacgggtgtgacagaacaactttcattcctccatcctgtggatttgaaggcagtccgtaaaatcgtgatcaaagaactcaaagattatcgagctttgaaagtacagcttgagaataaaaaggaatcggttgatgctggcattagcccgtttccttctatcagagattctttcatattaaatgaactgaaggtcaaacagatggaaagggcgttagaaaacagcctggacgatgaagaacggatgatcattgagaaaaaatacttaacagccagtcaaacaaaagacattcatatctatatggaacttggcatgaagaaggacacctattatgaaataaaacagcgtgccattttacgtattgccacagcactcggaattatctgagtgcttttttatcgacaaattcccgataaaacaggggacattttaggggacaaaaagggggactatttatgtttgaaatcccgataaacttaacctatcaacgaaatacgataaataaaacttatcgaaatacacgggagatgcgtctttcccttatcaagacgaattcggatacggaacaaaggtgttgaggaatggagccaaaacgagaggaacattctgagcctggatagcagctagtctgaggcgtccgtatcgggagaatagtaatatcgtgtttcattgtgcgatcttgctatacttggcttcctctcggagtatgtgtaagatcaatctttaaaaggcgattagcataaggaggttaatgattaaatttatcttgaactttctttcgacaaattttgcatattgtttctttgtccttttctttcaccgataataaggtgggaggtgatactatggctttaataaatcatcaaatatccatgcgattagagacggcagctagaaaagcacttcgccttaacggtcgtggcggattatatggtgtaattgatgcagattatattgatagagtcggtcgtgcttttaccgttcttgtagctgctgtttcaccatattacaaagatggttcagtagaggataaagcgaaaattgatagctttttagagaagtatttgtatttaggtgatacagacacacctaaagaagattactcgtcaggtgtacaagaagcagcagaagaattgcgtaaactagtagatgaattaaattaattgtacaagcactttccttttgtgaaagtgctttttatattctctgtaaactgcttccggtaaatctcagggaggactattggcggttaacggcttgagtacggtggcagtttagaaagaatatggttcagacttggaaggaggagcactatgaaaccttttagcaaatgcgaacaatgtggcgatgaacatcatatcgttttactcgagcacaaaaaagaaaatagcgtagtaattgggttcattcaatgtccatcatgccagcataaaacagtttgctctgtgactacgcctcatattagatcgcttcaaaagaggataagaacaataagaaaccaatatggaaaagccaaaagactaaaaaaagcagagcgcctgcttgctgaatatgaaaaggtgaatactcaaatcaaaatactaatgcaaccgctgattgatcaagagaatactagaataaatcagtaacgcctttctgtctctggcatggaaggctttttatttttaaggaggaactggcatgaaattgctgttaataagggcaaaaggacatatggacaaagaggttaagagatccatagagaatgatatacgccaggcgattagccaaggcttctatgtatatggggacggcatagatgtgtcagttgctgatgtggatgtatcagagataacacgagggaaagaaactctttgggtagatggaagaagaatggaggcatctgatttcaatggagatattgatgagaaagattggggaaaagattacgacaatcattgatgatgttattggagaaacttacatcaattcaacaaaagaagaaatagaggataaggtttatgccccttaagcccatgagagtatgcgccgcccctgggtgccccagcctcacccgtagccggtactgcgatacacacaagacacagcaacaagaagaaacaaaaaattacaacaaacattcaagaaacaaaacaataacaagtttttataaatcaacagattggaaaagaacaagacaacttgcattgataagagacaattatctttgtcagcattgtttgaaagatcattgcttcactccagctgacatggtgcatcatattgtggaagtaaaggaagattggtcgaaaagattagacttggacaaccttgtaagcctgtgtaatgcctgtcacaacaaggttcatggcggtaagggcaagtgaccctccccccctatccaaatctctggaaaggaaacgtttggagaacggcgccccctcttctgcaaacaaacaccgcttttcaaagttccggaaaaacaaaataccctcccggtgaaattgccgagagggcttggtacgactggttttgttgttaattccatcgtatcacgattggtgaaaaaaacaagcaaaaaatgcattttttttgatgtgaaatgaggtgagaacatgccgaggcctgcaaaatccgcgacgcttcaattgatacagggcaacccaaataaaaagaatacggaagagctggccgcccgggctgagcacgagaagaaaatgaaaatgcgatccgataatataaaaccgccaacgtggttggataaggtcgggaaaaaagaattcaaacgggttgctgctctattaacagaagttgaaatcatcacggaagcggacatcagcatgttggctgcctattgtaatgcatattcgcagtatgtatcaatttctaaaatcattgaagaagacgggatcatggtccatacagaaggaaaagacaaagacggcaacccaataaagcttgttggtgaagagcatcctttgttaaagcggcaaaagaattattttgatcaaatgaaatcagcagcgaatgactttggccttacaccgtctgctcgggcaaaacttgctatcacccgtacccaggaagagcgggaaaagacggctgcggagaaggagtttagaaacgtatgaagacaatcaaacaatttatcattgattactcgcgcgatgtgatatcgggtgagattgtggcgtgtgaaaaacacatttgggcctgcgagcgttttttaaatgatgtgagtcgggaaggcacaagggagtttccttatgtgtttgatgatgaaaaagcccgccggtttctttattggatgacccagtttaaacacacgaaaggacctttgcagggggagaatattgtgccagagcctattcaaatattcatctttggcaatgtgtacggctgggtgcataaggataccggctatcgccgatttaaaaaagtctattggcaggtcggccgtaaaaacaccaaaacgcagagtctggcttgtgtcggctcctatgaggcaatggctaatgatgaatatatgtccgaggtttacattggcgccacaaaaacagaacaagcaaaaatatgctggaacgaaattaaggcacaaattatgcaagctgaccttttgaacaagccggagaaaaaatatcggattgcatatggaaaaattgaacaccctaaaacacagtctaaaattgaggcgctttctaaagatgcaggaaaaactggcgatggttttaacccgcaatgcggcattatcgacgaataccatgcgcataaaacctcagaaatttatgatgtcctggcttccggtatggctgcccgggcccaaccattgatgttgattattactacggccgggtttgaattgaataatcctgcttatcgtgttgaatatgattatgtgtctcgcatattggacccgaataaggtggaacaaaatgaacagtattttgtgatgatcaatgagcttgataaaggtgatgacgtcaaagacgaaaagaactggattaaagctaacccgattgtcgctgccaatgagcatggattgaattatttgcgcggagagttggaggtcgcgcttgccgtcccggagaaaatgcggaatttcatgacaaagaacatgaatatctgggttaacatgcgggagaacggctatatggatatgcaagcttggacagattgcggttctgataaaatcccggatttgaaaaaccgagagtgctatgtcggcattgacttatcaaaaacaattgatttaacggcagcatcttttatttttccgttagataatggcagttttgctgtggaaagtcacggatttatgccggaggatacattccatgaaagaatgaagactgataacgtcccctatgatttgtggaagaaaaggggatggttaacgacaacagatggtgccgttgttgattatgactatatcagggcctacattaagaaaatggagaaagaaaacggctggcgtatcaaggaaataggctatgacccatataacgccacacagtttgctcagcaaatggaagcggatggatacacaatgattgagatacggcagggagtagccacgttgtcagaaccaacaaaagattttagagcaaaagtcaaatcgaaaaaaatcatacattcgaaaaatgacttactgacctgggcgatgggtaatgcggtaacaaaagtggacgctcaggagaatatcatgcttgataaatccaaatccactcagcggattgacccggcagcagcattgattaatgcgtatgtacgtgcttctcaagttgagagagcagttgacttaaacgcttatattcagtctggtgcttttagtctgtagggggaatacagtatgaaattagtgaaaatgataaaaccaattgtagaagatctcttactcattgctggcatggtcttcattgcagttgctttgtataggataaatattaacgcgggtttaattacgaccggtgtttttttattttctcttgcggggctgtcaggtctaattcagcaaaaaaatagtgatgagggaggggagtaaatgctattaagccgtctgaaaagcggaataaaaaatgaaattgccgaagaggatagtggttctcttctccatccagctacttggtttagaaatatctttgctggtactgaaagctcatctggtgaaagggtttcaagtaagacggcagttctacatccagatgtttatgcctgtgtgattgttttggccgacgatattgcaaaattgccgattaagctttttcagaatcaaaacggcaatatacaacaggttcaaaacaatgtaagtgaaatgattctgaacaaagtcaataactatatgacaagctttgtatggaagcggcttttggttacgcggctttgtacctgggggaacagctacaaccttttactttttgataaagacggaaatgtgacgggaatcagacccttagatccagaagcgacaaatacaaatatcgatcctaacaacggacgcgtctggtattccacaactcttgatggcagataccgtgagtttttttatgaagaagtgcttcatttcaaaaatctgtctcttgatggagttgttggacaaactcctatttcagttattcgtgacaatattggatcaaatagagccgccacaaaatttaacgcgaaattttataaaaacggaggagcgccgttcggtgttgtcaaagctccaacccttttggaccgaaaaagtaaacaaatacttagggaagactgggaacgggtgaatgcgggacagtctattgcagttttagacgccgggctggattattcacaagtgactatgcccatgagggatgctcaatttattgaatcgatgaaatggaatcggcagcagattgcatctatttacaaagtgccgccgcataaaattggtgaacttgatcgggctactttctcgaatattgaacaacaatcactagattatgtgaaaactacattgcagccatttgttacaaatattgagcaagagttgaacgataagattttaacagaaaaacagcggaatgaaggttattactttaaatttaacttggaatcagagctccgcggagatagtaaatcacgtgctgaattttataaaacaatgcagagtgttggtgcctttagcgtgaatacaattcttcaaaaagaagacatgactggtatcggtgagatcggtgatgagcattacgggaacttaaatcttgtgcctctttcaattatgaaagaataccaactcagcaagacgaaacagtccacggatcgactgaaagggggtgatggcaacggaacagaagaaaaacaagtattggaacatgaagattctgaatgagtcagctgctgaaatcacgctttatggatcaattactggtgaaggatggttcagtgagagttcatctaaagcctttcagtctgaattaaagagtctgggtgacgtgaattctattgatttgtatatcaattcacctggtggggatgtcttcgaaggtcaggctattcattctatgcttcagcgtcataaagccaaaattaatgtctatgtagatgcgctggctgggagtattgcttctgtcattgcgatggccggagataaaattacgatgccaagtaacgctatgatgatgattcacaacccatacatggggatggtcggaaatgcagcagaattccggaaggcagccgatgacctggacaagattactgaaagtatcgtttccacatatcttgcgaaagcaggtgacaaattggacgacggtactttacgccagctactggatgatgaatcgtggctcactgccgacgaagcattaaattatggattgatcgatgtggtttcagaatcaaaggatgtagcagcctgcattgatcatcgggttatggcacatttcaaacatgtaccaggaaaaattgttgctcaatcagctgttgaaagtccagctgaagaaacagaatcggatgaaatactaaaacaaaaaatcaatatgaaacttgaactcttaaatctataagggttcttttttatgccaattttaaggaggacaagcagttgaaacagaaaaagttattgaaccttgatattcaattttttgctggaggtggaatgtctaaaaaggaacgcgaattacgccaggctttggcggaaaaacgcacggacattgaagcactgaccgatgaaggaaaaatggaggatgctaaaaaactacttgctgaagcccaattaatcaaagagcaaattcaaacatatgaagatgtccgaaatatgcaggtttcgtatgaacaggaagagcagcaagaacagaaaggtccagaggcaaagatacagcaaccaacagatgatatcgcaggtaaagaagtgaaaaatcatgttcagcttttcgcatctgctctcaaaacgggtaaagtcccgcaaccacttgcagctatgaaggaaggcgtagatgaggatggtggacttattgttccacaagatatttccacaaaaatcaatgaaaagcgtcggcaatttgatactctggctaatcttgttgatgtcattccagtatctacaaacaaaggatcaagggtacttgaaaaattagcagatatcacacctttagtaagtcttgaggaattagcggatattgaagatttagagaaccctaaatttgaaaacattaaatacaacattaaagactatgcagggattttggttctctcaaatgatttgcttgcggatactcaagaggcgcttttgcagtatctctccaattggctcgctaaaaaatcggctgtaacccgcaatacattgattcttgaacaattgggttcacttgcgaaaacgacaatatcgaaacaggacgacattaaagacattctcaatgtcaagcttgatccggcaattaatgctacaaccaaagctgtaacgaatcaatctggttttaatgtgttggataaactgaaagatgctttcggtcgttacttgttgcaaccgaatcctacagatccaactaaaaaattactgttcggtaagccggtatccgttatttctgataagtatttgccaaacggtggtacaaaaactagccccaaatatccgttaattatcggagaccttaaagaagctgttaaactctttgatcgtcaacaatattctattttagccaccagtgttgggggaaaagcattctaccgtaattctacagatttgagaattatcgaacgtgaggatgtggttctttgggatacagatgcagttgtttacgcagaattttcatctattaaagatgcggttcctgacaacgggacacagattaacgatagcacagaagatcaatcagtagatgtagggaaataaaaacaatagtgaaaggatgatttaaatggcagattttctaaatgaaagtaacggagcaaaaacatcagcaagagacaatggatcaggggaacctattacagatgtctctatcgcggacaacagcgagcaaaatcctctctatgttaaaggccttcaaggtgatcccggccctcaaggtcctaagggggataccggtccgcagggaccaaagggagataaaggagacactggtcctcaaggtccaaaaggagatgctggcccacaaggtgagcctggtccccaaggcccaaagggtgacaagggtgatccagctgttatcggcgaaaaatctattgtacatgaaatgctgggagaaaaatcagtccgcagcattaacattggaacgggcagcgttatgatggaccacttaaatagtgaagtgaaaaacgtattagatgggcttcaaaaacaaattgatgagctgaaaccttcaacttctgccgaatgaaggacaggtgatgtcgaatgacagaagaagaaaaagttgaattagagaaggcaaaaaagttcctccgggttgatggtgatctggaggatgatttgattttagactttattgcatcggcaaaagaatacatcacttctgctacagggcttacattcccgaataaatcagccagggcagcaatgtgtgtgaaagccttcgttactcattggtatgaaaacagagaaattgctggcacaacttcgaacctggatggcgtactgactagtatgatcaatcaactgaaatatacattgccggaggctcagtctgatgctgaatgatatgagataccggattcaatttcagaaaaagaagcctactggccgcctgcctgtggatggaaaggacagctggcaaacggtaattgaatgctgggctaaagctgaaggtttaaaaggccgagaatattatgctgcggctgcgatccagaaggaaaagacagtggaatttacaattcgacatcgcgaagacatagacgaacatatgcgaatcatctttcgtgaaaaagcttatgaaatcgagtcgatcttgcctaactattctcgccggcatttcattacaattaaagcaaatgtggtgagctgatgaattttgagctggaattaaagggttttaaagaactagaatctacattcgcagacttagcccgtaaggacgaaaaaatccataaagcaactgtaaaagcaggcggtgctgtattggcggaagtaatcaatgataatgctccgcggtcagctattggggggaggcaccctcacatagacgaggacattattgttggaaacaggataaagcgagatgaagacggagaaatatatgcggttgtcggcccaacaaaggacactaaattccgtgttcacttgccggagtttgggaccattcatcaggcagcaaatccttttattcgaaacagtatgattcaggcgaatgataagatgcttgatgctatggaaaaggtcataaaggcggggtataagctatgagtcttttaaacctcatcgaaagatcaatgcaattaaaggacaaggtatttgaagcgctggaaactaatccggcgcttttatcgttggtagagcctgcaaatatttatgagctggctgtgccagaaggagtagaaagtaatccgccttatattgtggttcaggagatagactacagaacaactaaatgggctgatgggaagccgatacaagacagcgctgtttatcagattgatgtgtatcacaatagttcatgtgatcctatttttgtccctattgtggacgtaatgggcaggatggactttcagacaactttccccatcaatgaatttttacaaaaagaacgtcttatccgaaaaggatatcggttcgaagcgaacattttactataattggaggttttaagatgcctgaatacagttcagtgacaggtttgaagaatgtgaaatttgcgcctttaaaaaaggcgggtaaattttttgttcctacagaaattcttgactatgaatttgcaatcaatatgaaagttgaaacagaaacatccacagaaaaacaatatgcggatgacaaacttgtcgatcttgcagtttcaactggttcaactaaattagacattgaaatgcgggatctgccaatggagattctctctaaattacttggaattgaacaagatgaaaacggattgtacttgtttaagaaaaatatcattcctccttgggttgcgatgacgtttcaaggacctaaagcaaacggcaagtctcgtcatgtgggcttggtaaaagggagattctctttgccgggcgatgaatggaaaacaaaacaagataaaacggatttccaaacgatcaaactttcagccgaattcgtagatagagagcaggacgatgtgttcaaaatcgttgcggatgaagatggagaaaaattcgatatagatcacttttataaggcagtttttggggacgcctatcaaaataaacaagacacagaagaaaatgtaagtgctgatcttgggaaataaaagggggaagctgaaaagcttctctttatttagttaaaatctatttaaccaaaaggaggagtcattatggctcaaaaacatatttctatcaaattgtggtttgaagacgaaaaaaagtttaaaacttttattgcaccgcgaacaaatacaaagacacttcttgaagcgctgagattaaatgctgaagcggaaaaaacatcagataatcttgaaaagagcatcaaaacattagagaaacaaatccagtttattgtgaaaatattccgtgaccagttcacttatgacgagttcaccgaagggctacaatcatttgaagtgacaaaagaagtcagccgaattctctcagaggtagctggatacaaagaaattgaggaagtggatcaagattttttgcaggagaagacggagatgaatacacctacgaaagaggaatcgagcaaataaatgaaatttattccacactgcttgaacaaggatggaaaatgactgaaatagataacatggacatttaccattacttagaggttttggctgaaaagaataaaccaaaaattaagacagtaacaattgatcaaatcttttagacaggtactcacctgtctttttttattgagtttatgccaggaaagcggggtgtttacatatggctcaaccaataggaaacatggttgtcaaagtaggtcttgatgatacaggttttaatcgaggtattgaaggcctaaaaaggcaaatgcgcctggcaaactcagaaatgaaggcggccggcagtatttataagaataccggtgaccaaacgaagctccttcagtcgcaaatggaagggctaaataataaatataagattcaaggccgtttagttcaagaacaccgtcagagatatgatgaattggcccgtcaaaaaggaaaggacaaccgcgagacacaaatccaagctcggcgcttaaatgatgcaatagctgttcatcaaaatttaggaagagaactgcagcaagtcagcaaagaatatgaaaccttgtcaggaaacacgagccgggctgcaagtgttttctctgtctttaaaaaggattcacaagaagtatcaaaagaattaaaggctgtctataattcagcgactgaaacagggaaggcgctgacagctataggggcggttggagcccttggcataggggcaactgttaaggctgcagccagctttgaaaaggaaatgagccgggttgcagcgttagcaaatgcaacagatgaccaaatggccgcgcttactgaaactgcccgccatcttggggccgtaacacaatacacagatggtcaagtagccgaaggaatgcagtatttagccatggccggctataaaaccaatcaaatcatcggcgcaatgcctgggttattggcaactgctgcagctgggcaaaccgatttaggtgttacagctgatattgtctcagacattttaacggagtttcatataaaagcagaggacactaaccgcgttgctgatgttatggcttatacgtttaccaattcgaacgctaggcttgaggaaattgggcaaaccatgaaatatgcggctcccgcagcaaaaaccgcgggcgtgagcatggaagaattggccgcggcaaccgggatcatggcgaacagcgggattaaagctgatatggccggaacagctttgcgttcaacattaactcgtttggctgcgcctccaaagccagcagcatcggcaatcgaagagctggggcttaaagtaacggattcaactgggaaaatgcgtccgttagcggacatcatagggcaaatcaacgagaaaaccaaagactatacggagacagaacaaatcaggattgccaaacagcttgccggacagcatgctctatcaggcttcattactttaatgcacgctggaaaggataaactccaagacttcacaaaaaaattggaaaacagcggcggcacagctgagaaaatcgctgataagcaaatggacaacctggccggttcatttgaatatctaaagtcggccacaaataacgctgttattacacttggaaatcaatttatcccagtgatacgtgctacaacagacgtcattacaagtgctgtgacatggtttgattccttgccttcttcagtggcgagcacgattgccattacaggtgcagcggtcactgtgttctcgctcttgggcggggctttcctgctgacattaggttctattcctaaaatggctgcgggttggaatatgcttcgcacagctggggcttatttaaccggaaatgtgaaccgtgcttctacaagtctaactgtttattctgctgaggcgattgcggccggcacagcttcaagaacagcagcagcgggcatgactgccacttcaacagctgcggcagtagcatccacaagaatggaccgttttcatcaaacctctgcacttgccacaaccagggtaggacggcttgaacaaacgacaaccagaagcgcaagagcgatgagtggccttagtggcgcttcccgtgtagcaggtcttggcttgagcttgtttggcggaccagttggaacgatcgccggattaatcctttcttttgctcctgaactgctcaagttcggttcagggatcatcaaagctggagtaaatgcagtaaaaggcgctggcgggtttatgcagcttgcgaaaagtggatttggtctttttaacattctaaaaaaaggtgccgggattgttggtcttttgcgcggtggacttagtttgcttgggggaccgatcggaatagctgttactggtgtcacccttctagctgatgcgggatttaagtattatgacaacttgaaaaaaagagtgctgccggcaactatcgactttggcgataaggtgtctgaatctacttcaaaagcgattaatgcttatgaagatatgaataccaaagtcggtgccaagctgaattattactatttaaccaacaaaaagatcacgaaaaaaatcgctgataacatgtcaagtgagtatgaaaagatgggccaaaccattcttgatggctatcaaaagagcactgataaatctttgaaagtgttaagtgatttttatgcttctaataaagaaatgtcagagaaagagaagacagaaacattacagaatatcaaagacaacaataaggacaagcataaagaaatatccgggtatactaagcgcatcaaaaagatttgggaaaatgctgctaaagatcaccgagatattacagatggcgaacgtaaggaaatagaacagattataaagaaaatgaatagccatgttgaatctgctcttactaaaagtaaagaggagcagacaattatcgctggaaaactaaaagacaacaaaactcaactttctgcaaaagaagcagcagccacagttaaaaacagcaaaaaagcaaaagacaatgtagtcaagaatgctgaaaagcaatataaagaagtggtgaaaaacgctgatctagagtattacgtcaagggttctatcactaaaaaacagcatgatgatacagttagctctgcgaagagccaaaaagatcaggttgtgaaacaggctgaaaaaactcataaaggcgtggtcagtgaagcgaagctgcaggctgctgggcatttagaagaagtagattgggagacaggggaagtgctcgggaaatgggatacttttctcgttgatctagcaggtgttgtcaataaaattaccggcgggatcaatactgttcttgagttcatgcacattcctaccattcctgaatggaagcctaaaggatacagcggaaactctgaaatgcaagtagcgccaggcagggcatatgcaaaagggacagactttcacccagggggaagggcattagtcggtgaagaaggttttgaacttgctcatacaccaggcatcggaacttatgtggttggaatgggcggcccgcaggtttgggatttaccgcgtggtacatcggttctcccacatagtcagtcaaaagaagttatggcaaccggtcttcctggttatgcaggcggtgtcgggagctttttcaaagacgcccttaatggctccaagaagcttgtaaaaggagcgatctcagcagggaaaggcgttgtcaataaagcgaaagatgttgcatcgggcgctatggaaatgatcctgaacggtcctgagaaaatgattaagaacttgtttaagggctttatcccttttaagtcaggcaaaggtgtggactcattaggaactggaatccttcaaacattaaaaaatggggctggtcagtttttaaaaagcattcttccggatgcagggcttttcacagcagaggcttataagggagcgacagggtctgcccaggttcaaaaatgggtagcggaagctgttggcattgctggtgtaccattctcatgggttcctggcttgatcaccattgcaatgaaggagtctggcggaaatcccaatgcaataaaccttactgactcaaacgcaagagccggtcatccttctcgtgggctgatgcagacaattccaagtacgttttcatccaatgcgtttcctgggcacaataacattttgaatccggtagataacattttggctgcaatcaattacatcaaaggtcgctatggagatatatccaatcaccctggattgaagtcaatggctcgcggcggcccttatgtgggatatgcaaaaggagggacttcaccggggcgcggcggctctaaatgggcgattctaaacgaacggggctttgatgaaaccacgattacaacagacccgacgtatcgcgaacgcaacatcggtttatgggcgcgtgtagggcgtgagcttggtgttcttccatcacttcaacaagggatgatttcaaaggctcttgtactgcttcaaaaagcttcaatggctaaagccgaggcagtgccgcaccccaatgtgaatattgacatgagccgtgtggttgagaatcaagagaagcaaatcagtatgatgagccagcaaatagacgctcttcagcaaaacatacagcttttacagcagcttgttttgaaagataatcacacgtatatagatggaactagagttgatcaaaccagtgcggaccgatataacaaaaaacgttacagaaacgggggtaagcctgcatggtaaaactgtttattgatttcaataacggactaggggagcagagccttgacagcttactccctcaatttgaagtattaagctttttgccggaagctccaaagattaatcgggaaacaatttcgatccctcggcggcacggactgattttgccgcaacatccacgagatgtgacttacgcggaaagaaaaatagatgttgaaatttatttgaatgctcgcatacatgagaatttttatatgtatcggcatcagctttatgcactgctggttaagccgttcccttattatatttcttctgaccttttgccgaatcgccgtttcttagttacctgtgatggtaatttcagtatttcaaaagagaaggagaaaacttataacgatttttctgttgaatttactaatatcacaggcatggcagagtcgaaatatacaacaaaaacggctcagaatcttaacggtgaaaattggaatcacgggatgaatctccgatcggatgataacttggactattattttaagaacaaaaaacgattctctgtttttaatgcaggagacgtgcaaatcaatccacttgatcatgactataacgttattttgaaagctgcagggaaaaatatcactttaatcaatcatacaaatggtgagaaattaacgattgagcaggaaatcaaaaagacacaagaagtctctttcttgaaacagtacaccataatcaataacaaaccgattaaaacatctggccgtctgccgagtcttgaaattggatggaatgagtttgaagttcaaaatacaaatgacttcaacattcaatttgatactcggctttattatttgtaagggatggtggtttggtggctaaagaggatttcataaaagaaatagctgtcgatgctcaaatcgtttataaaaatcatcatatccttgcatcgctaattattgcgcaagggtgccttgagagcgcatggggaacaagtgaacttgcgacaaaaggacacaacctatttggcatgaagggcgaatataacggacaatatgtcactatgatgacatgggaagtgatcaatggtgaaaatgttcaagtgccagcgaaattcaggaagtacccttcatggaaagagtcgattgaagacctcgctaacttgtatctcaatggtgtaagttgggataaggaccattacagggcagttgtcggagaaacggattatcaaaaagctacggctgccctcgtaaaagctggatatgcaactgatccaaattatgcaactaagctcaacagcattattttcacatacaaattaacccaatatgatacaactgaggggctgcccgataatcctgatgaaccaaataatcctgatccgaccgtagacctaccaagtaaagagtttgacggaaaagacataacgctaaatatgagccttcctaaagatgtatattttcctcagttacatgtcgcaagtcaggatgatacacaagctattgaagttattggagctgatccggacttattagacgatacgacagggaaaaaggatattgaatttacgatcacccggacagctgataatggcaccgaatatgacttgcttgtgaatgacaatattctttatctggatgagaaaaaattcaatcatcaaaagtatttcatcacagatattgagattaaccaggaagggatgctctctaaaaaagtaacagcaagccacgtttttgttgtaacgctgaataatcactatgtagaagatacaatcagtgggacgtttaccgtcaggaagatgcttgattttgtttttaaaggcacaaaattaaggtacatctttaaggacaaagaaagtgagttctcaagcgttgaacaggagaattttggagatagattcggaaatgagctaatggatgaaattgtcgaagactatggtttggagctggacgttgataattataaagtctatgtttataagaaaatgggaaagcgaataaatcatacacttgatactcgttataatatgcctggtatcacaatcaaaacctcttctcaagggtgctctaccagagcgaggggttatggtgcaattaaagaaaacagcagcaccgacagcaaaaaaacagagtatgtttttgacccggtattgtacaagcatccagatgaagataaatttttgattgatggtatgccaagatgggcagaaccattgagggatgaaaaatataaaaaagagtccagtatgttggcagctctaaaaaagtatgttaacccatatccacagacggaaatagaagtggattatgaatatatctacgagccgaagcttttgaagatacaagaagatttttggaagggagacacgcttcatatattggctgatacctcatatggtgtcacctacgaagacgatgtccggcttttgtcgattcaatacaagccgttgaatccttacgcaaaacctacattgacttttgctaacttccgaaaggatatacaagatatccggatggaacaagaaaaaagattaaaagaccaaaaacgctacatgcaaaaactcagaatgatgatctaaggcactctttccagagtgttttttgttttgtctagaaaggagagtgatctcatggcattcaggttaattaaagattatgatacaacccgaaatgcaagatatatcgcacagcaaagagcagatacagaaactatagaagatgggttgaacagtcttgatgatgcgattaaaacgcataaaacgtctcaaacagctcatacttccgatcaaattacccatcaaggtttttctctccgaacctatattgaaagcctttataatcgtatgcgtaatttgattcttaatgctgacggaacaaatgtaaaagaggtcgtcgatgcccgtgttgatactgacggcaatattgcgcccttattaaaagaacggcttgaccgtgattatatgagattgaataagcgaataaaacgtgtcgtacatgtggatgattatggtgcagcaggggatggggtaacagactgttccgaagcgattatgaaagccatgggcaatggtaaagtgaaaattaaactggggccaggtgtctatgtcgttcgcggtgtaaagctaaaaagcaacgtcatctttgagggtgacggaatggatattaccactcttattcttcatgatgagacaccatcagatgaatgggtgatcacgaacgctgatcatcagggcggtaacaaaaatatcataattcgtgatatgacacttgattggaatcgtgaacggcaaaatggaaccatgaaggccatgggtggagtaaaatccagctgcttattgttagcacaggtaaaaaacgcttgggttcaaagagttcgaactgtaaaccccgcattgcatggtattgatatctcggctccaacgtatgacatttcagaaagtgactataccaaaaacggctgtgattcagtttggattgatggatgtgtatgtgaagggtatggagacgacgggattacaactcattacagcaaaaatatcttcatcacaaacaataggtgtttatatccttctggaacagcccatgcccttggtaaagccaattcaaatggtattgaagtagatgacggctctaaagacgtgtggttatttaacaattatacggaagggaatgtccgtggggtggaagtaaaggcacatgcgaagtggccggcaccttctaatgttcatgtttacggtcatcaatcattccgtgatgtgagagcgtatgaccttcgtcatatcggacatcattatgcaaatgagccatggagtgaaacggcaagagatgtcactttagtagactgtacggctaaggagccgatattcaatgatttgtacgctgggctagagccgaaagcgcttgtgatttctgcttatcagcgagttacagtactgggctttacagcacttggtgatcctacctatgactataaagggaccccagttatcgccttccagtataaaagccgcaagattaacattaatggtttgaacatttctggatttgcgaaggcgggttcagatgtccgtatctatggcggtgatcaaagaacggatgatgttcgtatttcgaattttactatccatgattcagccccagagggaatttccatcggtggcggggtttactatgtcactttaatgaacggtatcgctcatacaagaggcggcagtatagggatttcgtcaccaaacaatcaggctgatataacagcagttcgggctgttggctatactaatgcagcagttttagcaggtcaaaaatatagttcggtacctacaaacataaaaggcggcttccgggctgctgccagatcgggctcacctctaacggatacaagtgcaatcatagctggatcgggaacgattatcgcgaagggtgaacggaatttcattgctggtattgctggcggagcgtccacagaaggatcgcgcaatggtgttatgttctcctataactctcatacaaaaggagaaagcggttcttcggttgttatggcttctaaaaatgtaataaataccaaagaatacagcatcgctttagggcatggtgacggtaatccatcagaaggaaacaaaaagatcgagttagatgcaattggcggaaatgttcgcgctacaaaccgtgtggaaagcgtctctgacctaaaagacttcgcagaatactttgagacaactgatggccagaaaattgaagcttcctatcttgtagctttggaaggcgaaaagattcggaaagctgacgttggcgataagattctcggtgtcgtatcgaagacggccgggcttgtcctcggcggtgctgctttcgattggaaagaccggtacttgagggatgagtttggcggcattatttatcgagaggtttacgacggtgaacgggttagaatggtcccggcagaaaatccagactatgatccttctgtggaatacacccctcgtgaagatcgagatgaatggcatgtcatcggtcttattggtcaggtgtttgttcgtattgattccacagtgggggtgggcgatagtgtaacagccattgaaggaatagcgacaaaagctgaatccagcggatacggcactgtcatgaaaattgaaatgccatacgacgaagaaaaaggctacggagtagcaaagatgatcgttacaccgcagcattaaggaggctgaaccttgatttataaagacgcaaacgttacttatgatatcaattcccgcagatcagacgggagagcaacaaacattcaatttatgacgcaagacacgggcagcgccaagctgtccttttcttttacaaaagacggcgtaccacttcctttgtctgcggtcgatgcaaaaattgttttgctttattcggacggctctttctataaaaagagtcttactatcatagacaaagtgaacggaaaagcagagtatattttgtctgatgcagaattaaaacatcccggtattgtgaaggcagaattaaagctttactacacaaatggtcaggctctggctacttccttttttacgtttacgatatcaaagacattggaggatcagaacattgtcccggtagcggaatattacattgatgattttgagatgttacgggacgagatcagccaaactctcgatgagataaaagcgaagttcgatgaatttgaaaacattgaaacgaaagctggcgcccaagaaaaagcagacaaggccgaagcgaacgcaaaagcttacacggatgtgcacgcgaataataaaacgatccacattacggcagatgagagaacaacctggaacgcaaaggaaacgacatcgggatcgaaaagtaaagctgataaagcgttagttgacgcaaaagcctacacagatgaacacacagcggacactgttaagcacattactgcagctgagcgtacgaaatggaatggtgctcaattatcaaaaattaccgcagatcatggcggtgtgtcaatcgccgcgaatgaaggagaggacatactcaaaaaaatagttgatcagggccggacaatgggtactttttacgcgcacggaaaagcgattaatgctccttcaacagtttcaacaagaggaatatttcatcttacaggccttgcttctgatgggaaaggtatgtatggatgggtttacgctacagattacaagaataatgtctttacaaactactatgacggcagcacaacgtattggcaggggtggaaacgatcattaaacacagatgacttattgtattcgtacgctaacatcactttaaagaatggtgcaacagccggaacacggacacctatttatgcaaaatggggacctttaacgttattacgtgggcatgtgaaaacagaaccagaaatcatatttggctcaattccttcttcatatgctccaatcggtggggcagttgtaacagttccacttagcggaacaggtgggacggccaacctcattgtatatgaaaacggagatttaaaaatcaaatatccagaccctacagattcaagtaagcttggcggtggatactatattgatgtcgtcatcgggtttcaagaaggaggtactgcatgatacaggtttatcggtatgatgagaactttatttttgtcgagccggttccaattgaagagccgggggaggatggaaagtatgtaattcctgaaaattgcacaacaattcagcctccatcattcattaaacctatgtttcaccccgaagagcaaaaatggtcagaagtagcaactcaagcagaaaaagatgagattttaaaacaagttgaaaaaggaagagttccgtcacctttagatgaattaaagtttcaaaacgctcaaatcatggtgcagctggctgaagcccagaacttgatagagtctcagtcgaaaatgattgcggacttgttattaatgctggctgaaggaggggaagcgtgatggattggttcaaaaatatccaaaccatttatggatggggaagacagtattacacaaatgctgacgtcgcccgttttgttgtcttaaatagaatcacagaagaacaatataaagaaattactggcttgacctatccagccactgagccagttgtcatagatttaggaagttaacaaacacccattgaggtgtttttattttgcctctaaggaggtgataacaagaaatggaggaaacgactgtgtttattaactttgatacattggatttagcgagagtttacctgtttgggggtgtaaagtacctggatttactgctagttctaagcattatcgacgtaataactggtgtgattaaagcttggaaattcaaaaagctgcggagccgaagcgcttggttcggttatgtccgaaaaatgcttagttttctggtggtcattgtggcaaatatcgtagatacaatcctcaatctgagcggtgtcctgacatttggaaccgttcttttttatatcgccaatgaggggctttccattacggagaacctggcacagatcggcgttaagattccggctgccatcactgaccggcttcacgtaatcgaaaatgacaacgaacaaacaaaagaaaaggatgaacaggctgctggataacccggtggctttttatattaaaaataaaggagagaacacttatgacaatcacagtgaaaaagaatcttgtatcagaagctaaatacgctttgaaatgcccgaactatatggacgctgaatacatcaccatccacaatacagcgaatgatgcgtcagctgctaacgagatcagctatatgattgggaatacaagctcgacaagctttcactttgcagtcgatgacaaagaggtgcggcagggcatccctacaaatcgtaacgcatggcacacaggagacggcaccaacggcaccgggaaccgtaagtcgattggtgtcgaaatttgttatagcaaatcgggtggcgctaaatactacgctgctgaaaaattggctattaaatttgtggcgcagctgctcaaagagcgcggctggggtattgatcgtgtgcgcaagcatcaagattggaacggcaagtattgcccgcaccgaattttgtcggagggcagatgggatgaggttaaggctgccattgaaaaagaattgaagtctctgggcgggaaaacaacttcaacatctgcgcctaaagcttctgggggcacttacacagtcaaaaaaggcgatactctttccgcaattgcaaaagagcatggggtaagtgtggcaaatattcagagctggaataacattaaggacccgaataaaatcacagttggccaaaagttaaagctcacaggctcaagcacttcgagccctaaaccaagcagtaaaaaaacgtcatatgctctaccttccggggttattaaagtgacaagtccgatgacgaaaggcacgaaagtaagacaggttcaaaatgctctggctgctctttatttctatccagataaaggggcaaagaataacggcattgatggcgtgtatggtccgaaaacagccaatgccgtcaaacggttccagctgatgcacgggctttcagcagatggtatctacggaccgaaaacaaaagcaaaattggcagctctgttaaattaacaaaagaagccctctataaaagggcttctcttttatacatttcgaatagtcatatcacatttatcttcctctgaagcatccatagccttatatagcacctcaaagaaagtttgtccgtcgtttgtcgcgaaatagtttgatagattggttactttttgacttatgttattaccccaaggtggattttttgataagtcttcaatatcccaaataaccttttcaggagagagtttagaaagttctgcttcaatttcttttaaattctctctagcagttggaacgtcgctccactctaatttatcatggtataagttattcattaataaaggatattttgttccccatccgtctttttctaaatgatatgagattgtagaaaaaaatgaatgaacaaagtcgccgtgtcccgcctcatagaaaaagcagtcaaccataaaacctactgccatattagacacccctaatccattttaaatattatttctgctttattatccgttctttcatctatttttcttttgacatctcttaatatatctctcgatactgtctgaccacgtacgtctattataacagtttgttttgttccttctggtaagtcttttatccttttgttaaattgattggatacaattctaacaagattacttcttcctgatgatgtggtcaacttataattttttacctcaatgctatgccctgtattataaaaatcagggcgggagctgtccttagttccgtgttttacctcgattctctccttaaaggacacttggtctttgtatccaggataatcctttccaacgtcaacttctgactggcgccaagatggtcttttagagccagttggttttttggcatttagtttagtattaactccacgtaagccgaatccacccagcaccgataacgcatgattaaggctgttttgacgttgctcatcagaaattttatttccaaacatatctcggccagttattgcttcgctaaaaccgtttgcagatgcgagaccgtaaagtcctttgctggagttttgaagagcgtgaaatgtcttaggcgttttataggcatcaagcgctttgtctgctttgtagatcgctttgctagttgaatacacagcttttacacctttgcctaatttacctgcccatcccacaataggcacataacctgctgcagccattgcgccagctgctacacgttggccttctgtcaacttttcaccggtaacaggatcaacgccatcggcggctcttttataatcataatatccagatacttcccctgtaaaattacaaacaacattccacgttttttcgtaccatggcttatttgcaagctcttcctgttcttttgctaactttctttgttcggcctgttgatctttaaaggagatatactcagtcgattgtttttttacatcctcagtcatcttgtggacttcactgtccctataagccttggcattatagtggatgggagaggcgctcttgccttttgcagttgcgtttatgagtgcttggtaatcagcctgaatcatttgttcatttgcttctgatagggcgtattcagacgtcagattctcatcgacttcacttattttctcgactgcatttttgcgttctttctcagcagaggataactcatttttaaaatcttctgtcgaaaaaacatctaaaggaaggacatcgtgtatttcatttaagatgtctttgatggcctttttctgttctgacatgatggattttgatttagaattagcattggccaactcatgctctaggaaggattcttctatgtaggcatctgataagctggcgtcttccaagataccaggaatgctcgttaaaaaagatattttcatctcaattagatcaatccactggtcagcaatgccggcctgatcttcataaaatgatttgatgttattggcacctttacctgaaaactcgctatcatctaaatcagcgacagctttaaatgctttctttaatttggccattttactttttaaatctttgtattcttttgcacggttttcagcttccgaaagcagtgttttggcttcaaataccttcatgatcatatcctttcatattgaatttaacacagggattttaccatagtttgggagagagggactgataataaaaatgtcgtttcaagaatgattcaaattacacagggattattatccttatttaaattcttacctcacaatattaagtgctaaagatatatttttaatgacttctcaactcttaaaaaatagtaaaaattaacctgttgaaaatttgcgccataacgaaaaacaaattgcgttatgtcgaaaattatttctatatatgacataaaatgttaaacgtgtgttaatatttgtttgagaatttagaattttgacagaaagaggggtttattatgagtaaacttgcttctgagtatgttgctaatatcttaaatgaatggtatatggctataaaacagcaaaacgtggaggctgccgagaaatacttcaaagagagcagagctctatttgatgaaatggaagaagaccaggaagtattgatgtactattctttacttgaagagagacataaaatgatgctccaccaggataaaggaaaagaatttccaaagcactcttatttcagtaaaaaacataagagagaaataagaaaaacagacaatatgatcgaatattatttcttcttatttgaggcattatacgaatcgcacaatcgtaattacggcaatgcaattagtctttttaaaattgctgagaaaaagcttgcgaatattccagatgaaattgaagcggctgaattttattcaaaagtagcctctctttatatgatgcttggccaaaatatcgtgtctttaaactatataaaggatgcaatgcacatttacaaaaggaatgaggattacaaaaaaaagcttgcgacgtctatgatggttgtgggacataactatacagagctgggccaatatgataaagctgaggatatttattttgaagcaatacgaatttctaaacaacttgaagaccctttttttgaagctatgattcatcataatttaagtatcacttattcagctgctaaaagatcacaagattgcataaatgctctgaaaaaagcattgagaaatgatgaatggaaagagtcagtttattacacaaactccctgtatatgatcacaaaagagttcttcataatgggactatccgatcaagctgtttattattacaaaaaagcacaggaaaacttaaatcaaaaagagaataaagtgtatgaggctaaaataaacattatttatgagttattccagaaaactcctgaagaaagcgttaatcagtgcaggagctacattcatttcttgtttgaacagaatgacgcggatagtgtgcacgatctcgctttaatcatttcgcaatattatgaggcgagaggatatattcaagaagctctggaattttctaatcatgctattttagccgagaggaaaatgaagcagttggagggagtttaatgaaaaaggtaattctttgtttagctgttctgggcgcgttagcagctgctagttatgcgggctcaaacgctcatgttgcagagaaaccggttggaacttatatgctattagcagaaaaaccagtaggtacctaaatacaacccttctcatctgagaagggcttttttatataatccatcttttcttttctttatcccaagaaatcgctccttttcggataaggcattttgtggcctcgcgtatttcctgttcgccttttccggtctttcttttcagttcgggaagagttggattctttccgtatagactcatatttacaaagatttgatataacttgcgctcaaaatcagtcacacaatatcaactcctagagctaggtacatcgaaaaaacaattgtaagtattagttggttttgtcataaaatagaccggttattagtggtcctccattttcagctttttctttctgaactgatccataaaggataatggtttggttctcctttaactttgtagggaatagggcaaaaacattataaacaccatacccatttttctctttagatgaaataataaattttcctccagcttcggcattttcgattgcagaaacttttcctttgatacgaacgattttgtctggagggttatcaacattgatttttttgaaatcagcatcttcagcttcctttctaatctgttgctgcttttcctcagttgaaacatcgtccagtccatcttgttgagaggtgcttgaggtaatggattttttctcagttggcgaatcatctgattgagccatataagtaaatccacagatggtgagtaataagcttaatggcaatatccatattcctttttttcttgttcttttgaagaataaaagaaataaaccaattacgattccgattgcggaaaatatagagagaaatcccataaataaaatcataatatcctccattttttaaaggtaacatttatatcttaaaacagatgagtataattttctattctatacagcggggttaggagggaaaacaaatatggatcagctacaaaagcaaaacttgaagcctttcttaaaataataaaagcccttccgattgggagggctctatttttaatcttcttcttttacgcattcttcgcaaaaaccagaaccgtataaaaactctacacgttttccacatttaccacattgacaactttcagccaaaagtaacatcccctttcatttaggataagaaaattataacaatatggtgaaaaaatactagttttatttacagttcctattgaccattgtaaataggtattgtataattaaggtatgaaaggaggtgcttaagtggacgaggtgagaaactggattcttgctatcgctggcatcgttaccatcattaaacacatttacgacatatggacgaaggaaagcgaaaagcatagcaagaaaaagaaaaagcgctcccgccgggtaagcaagaagcgctgatacacagtgagcaaaggggagaaatccccttgctcataccattatatcacgtccacgatagtatgaaaaaatattttaagcagtacagcacaggtgactttgccgttttgctcattttggttgcggggatcgttgcaattgatctgactgacgagggtatgtctggaaaaattgcgcatactgtattgatgatagccgttgttgttaccttgttaaaaggattcattatgatgtggagagaaagccgacatgaaagaaagagaaaaaattaagtttatccaggaagaagttttgacggcagcggaagcgggggagctgcttggaattacccggcagcgcttgagcactcttgtaacctccgagaagcttaaaccggttaaaaaggtggggacagttgcattgttcttactggatcatgttctatccttaaaaaaagaattagaggccggccggaagaagtaccgtccttatgatgaatgaagcccactcatatgagcagggctttttacttttctaggaatcgcgtggtacttttatcccctttatctcgaagtgagagttttttaattgtttgggaacgaatgttctggtatcttctttttgaggtgataggtgtgaaagagctaccaaaagagctacttgaagaacttgaaagaactaccttcctattaaacgaagttatagagatatacgagaagcaccaaggggagccagaagaaaaaccggctatcacttgcccatcctgtcgcaaagaatcaactaactatgtctgcgattggtacggtaacaggcatgtccattttcattgtgagtgcggctgccgagtccatcaataaataaaaggccttcgacatgcgaaaggcctttttacttatgctcctactattatttcacgtcctgggctcattcctacaggtgggtcatggtgtgttcctacaggtaactcacgttgaattttcatcttgatcactcctctctataatgacaaatactgcatcctcccaaaatctccttttaaattacaaacacttttttaaaaatctgaaaaactttttgaaacatttcttgtagctgtgcgtctaacatacgtatccttagatattttctgtatttatgtctatttcacatgtttatacttaaatacaaaaaatcaagtcatccataaacgcaccgtatttatcggaagcctgaattcatctattgtccacccgcgagaggtgtttaaagaagcgtttaaacgatctgccgcttcctttatctgtgttcataatcacccttctggagatccgacgccgagcagggaagatattgaagtgacaagaaggctgtttgaatgcggaaacctgattggcatcgagctgcttgaccatttggtgatcggggataaaaaatttgtgagtttaaaggaaaaaggatatttgtaacactttttttttcgtcgaattaagctataatagagtttatgagtttttccctttagggtatttttgctttaagaaaggaagatacatacatatgtttggaattggtgctagagaccttggtatagatcttggaactgcgaatacgcttgtttttgtaaaaggaaaaggaattgttgtgagagagccgtcagttgtcgctttgcagacggatacgaaatcgattgtcgctgtcggaaatgatgcgaaaaatatgattggacggacaccgggcaacgtggtggctcttcgcccgatgaaagacggcgttatcgctgattatgaaacaacggcgacgatgatgaaatattacatcaatcaagccataaaaaataaaggcatgtttgccagaaaaccatatgtaatggtatgtgtcccatcaggcattacagctgttgaagaacgcgctgttatcgatgcgacaagacaggctggagcacgtgacgcgtatccgattgaagagccttttgccgcagcaatcggagccaatctgccagtttgggaaccgactggaagcatggttgttgatatcgggggcggtacgacagaagttgcgattatttccctcggaggcatcgtaacgtctcagtcaatccgtgtagccggtgatgagatggatgacgcgattatcaactacatcagaaaaacgtacaatctgatgatcggtgaccgtacggctgaagcgattaaaatggaaatcggatctgcagaagctcctgaagaatccgacaacatggaaatccgcggacgcgatttgctgacaggtctgccgaaaacaattgaaattacaggaaaagagatttctaatgctctacgcgacactgtatctacaattgtcgaagcagtgaagagcacactcgaaaaaacaccgcctgagcttgcagcagatatcatggacagaggtatagtgttaaccggcggcggagcgcttttgcgcaatttggacaaagtcatcagcgaagaaacaaaaatgccggtccttatcgccgaagatccgcttgattgtgtagcgatcggaacagggaaagcactggagcacatccatcttttcaaagggaaaactagataatcgggagttcaatagaagaggtgtaacacgatgccgaataagcggttaatgctattacttctgtgtattatcatattggtggctatgattggattttcgctgaagggcggccgcaataccacctggcctgagaaagtgatcggcgatacgacgggagtatttcaaaatatttttcatacgcctgccgaattttttgcaggaatatttgagaacatcaatgatttaaaaaacacatacaaagaaaacgagcgtctaagagaaaaacttgacggacagacacaatatgaagccaagcttcaagagcttgaagaagaaaacaaatccttgcgtgacgagcttggccatgtcaaatcgattaaagattacaagccgattttagcaacggtcatcgccagaagccctgataattgggccaaacaggtcaccattaacaaggggactcagcaaaacgtagcgaaagatatggccgttacaaacgaaaaaggcgcattaatcggcaagatcaaaagctccggacttaacaattttacgtctactgttcagcttttaagcgatactgaccgcaataacagagtcgcgacaaaaatttccggaaaaaaaggcagcaaaggctacggcttgatcgaaggatatgacaaagagaaaaaacgtcttaagatgacaattattgagcgtaaggataaacaagacgtgaaaaaaggcgatcttattgaaacatcagggacaggcggtgttttcccagaagggctgacaatcggtgaagtgactgatatcgagtcagattcctatggactgacgaaggttgcttatgtaaaacccgcggctgaccttacagatttaaataatgtgatcgttgttaaccgtgacgtgccgactgtcgatacagaggaggaaggatcgtgaaacgtttccttctccctttcgttatgatgcttgttttttctgcggaaagcatttttacagatttggtgcattttcctttcgttacagatgaccaagtgctcgccccgcgttttttgatgcttgtattgatattcatgtcggcttttatcaaccaaaaacacgcgatgatttacggatttatttttggttttctatatgacatgaactatacaagtctattaggcgtttacatgtttggttttgcagggctatgctatttggcttcaaaagcgtttaaagtgttacatacaaacgcatttgtagtgatattgatagcagttctggctgtctgtctgctcgaattttacgtattcggcattcagtctttgattcataaagacattatgacgtttaacggatttgtgcttgaccggtttataccgacaattttattaaatattgcagcagctcttattcttgttctgccatttagattgttttttatgagtctaaagaaagaattgagagatgagtaaaaaggattttatctttttttgacgaaatgagtatgttgttgaggtgaatattgtgaagaccaaaaagcagcaatatgtaacaataaaaggaacaaagaatggactaacattgcatctggatgatgcgtgttcttttgatgagcttctcgatggtcttcagaatatgctgtcaattgaacaatataccgatggaaaaggccagaaaatcagcgttcatgttaagctgggaaatcgctttttatataaggagcaagaggaacagctaaccgaattaattgcgtcaaagaaagatttgtttgttcattctattgacagtgaagtcattactaaaaaagaagcacagcagataagagaggaagccgagattatttctgtatcaaaaattgtccgttcaggccaagtgctgcaggtaaaaggcgacttgcttctgattggtgacgtgaatcccggcggaacagtcagggccggagggaacatttttgttctgggctcactgaaaggaatcgcgcatgccggatttaatggaaataatcaagcggtcatcgccgcctctgaaatgcttccgacacaattaagaatcaatcatgtgttaaatcgctccccagaccacattcaaaaagggaacgaaatggaatgtgcttatttagatacagacggaaatatggtcattgaacgccttcaacatttggctcatttaagacctgatctaacaaggcttgagggaggaatgtgaattgggtgaggctatcgtaataacttcgggaaaaggcggagtaggtaagacaacaacatctgcgaacctcggtaccgccttagccattttagggaagcgcgtatgcttagtagatactgatataggactgcgcaaccttgatgttgtaatgggtcttgaaaatagaattatttacgatctggtagacgttgtagagggcagatgcaaaatgcatcaggcgctcgtaaaagacaaacgtttcgatgatctgctctatttaatgcccgctgctcaaacgagcgataagacagctgttgctcctgaacaaattaaaaacatggtccaagagctcaaacaggaatttgactatgtcatcatagactgtcctgctggaatcgagcaagggtacaaaaatgccgtttccggagctgataaagcgattgtggtcactacgcctgaaatctcagctgttcgtgatgctgaccgtattatagggctgctggagcaagaggaaaatgttgaatcgccgcggctcgttgtaaacagaatcagaaatcacctgatgaaaaacggtgacacgatggatatcgacgaaatcgtacagcatctgtcgatcgatttgctcggaatcgtggctgatgatgatgaagtcattaaagcttccaaccatggtgaaccgattgcgatggaccctaaaaaccgcgcttccattgcatatcgcaatattgcccgccgcatcttaggtgaatctgttcctttacaggtgcttgaagagcaaaacaaaggaatgatggctaagattaagtcatttttcggagtaagatcttaatgtgatagaatcaaagagaagaatctgacaaagcatatgctgtgtcaggtttttttgtttttgcctgctttgttcttgactaaaccgaatatttgccatggacaagacatatgatgtacaaacccaacgaatgcaaaggatgatggcaatgagtcacagagcagatgaaatcagaaaacgattagagaaaagaagaaagcagctttccggctcaaaacgtttctctactcagacagtttctgaaaagcagaaacccccgtcctgggtgatggtaacggatcaggaaaagcatggaacacttccggtctacgaagataacatgccagcattcaacggaaaacacccattggtgaaaacagattcaattatcctgaaatgtcttctgtcggcctgccttgttctcgtttcagctatagcctataaaacaaacattggacccgtcagtcagattaaacccgccgtagccaaaacctttgaaactgaatttcaatttgcctcagcaagccattggttcgaaaccaaattcggaaatccgcttgctttcctggctcctgaacacaaaaataaggaacagcaaattgaagtaggcaaagatctgatcgcgcctgcatccgggaaagtacagcaggattttcaggacaatggggaaggaattaaagtcgaaacaagcagtgataagattgatagcgtaaaagaaggctatgtggttgaagtcagcaaagacagccaaacgggactgacggttaaggtgcagcatgctgacaacacctatagtatctatggcgagctcaaagatgtggatgttgctttatatgattttgtggataaaggcaaaaagctcggttcgattaagcttgatgatcataataaaggggtctattattttgccatgaaagacggcgataaatttattgatccgattcaggtgattacatttgaataaatggctcgaccttatcttaaagatccatgtgcatccttttctttggattatcgcggcgctgggcttgctcacaggccatatgaaagcattattttgtctgctcctgattgtattgattcatgagctggggcatgctgctctggctgtgtttttttcttggagaatcaagcgtgtttttttgctgccgtttgggggaacggtcgaagtggaagagcacgggaatcggccgttaaaggaagagtttgcggtcattattgccggccctcttcagcacatctggcttcagtttgccgcctggatgcttgcagaagtctcagtgattcatcagcatacctttgaactcttcaccttttataatctttctatcttatttgtcaatttactgccgatctggccgctggatggaggaaaactgttatttttgttgttttccaaacagctgccttttcaaaaggctcaccggcttaatctaaaaacgtcgctctgcttctgcctgttgctcgggtgctgggttttattcgtgattcctctgcagatcagcgcatgggttttgtttgtctttctggctgtttccttgtttgaggaatatcggcaaaggcactatatccatgtgagatttctcctcgaaaggtattacggaaaaaacagggagcttgagaaacttctgccgctgacagtaaaggcggaggataaagtctatcatgtgatggccgagttcaaacgtggctgtaagcatccgattattatagaaaaatcaggccaaaagctcagccagcttgacgagaatgaagtgctgcacgcttactttgccgataagcggacgaattcttccatggaggagctgcttctgccctactaaaactgattgacaaacgccttgtattttggtatattttttaatgttatggatgtagcaccattgctacaaccgctcagtacaggtgttaagagcttttacagccccctggtatctggcgagtcttagtctaataggaggtgcagagaatgtacgcaatcattaaaacaggcggtaaacaaatcaaagttgaagaaggccaaactgtttacatcgaaaaacttgctgctgaagcaggtgaaacagttacttttgaagacgttttgtttgttggcggagacaacgtgaaagtcggcaaccctacagttgaaggcgcaacagtaacggctaaagttgaaaaacaaggccgcgcgaaaaaaatcactgttttcagatacaaaccaaagaaaaacgttcataaaaaacaaggtcatcgtcagccttacactaaagtgacgatcgaaaaaatcaacgcgtaagcatgattcaggcaacaatcagaaggtctcatgataaaggcatattgtcttttgaaatgacgggccatgcgaattttgctgaacatggacaagatcttgtttgtgccggagtgacagccgttgtgtttggagccgttaacgcggtcattgtgctcgcgggcttcgagccgcttcttgatataggggaggacggggggtatttttattttgaattccctgaatctcttgatccagaggcacgccaaaaagctcagctgctgattgaaggcatgattgtttcgctggagacaatcgaacgggattacaaagacaacttgcgtgtgaccacaaacataatataggaggtgagctacatgcttagattagatcttcagtttttcgcttctaaaaaaggagtaggttctacaaagaacggacgtgactctgaggctaaacgtttaggtgctaaacgtgctgacggtcaattcgtaacaggcggttctatcctttaccgtcaacgcggaacaaaaatttacccaggtgaaaacgtgggccgcggcggagatgacactctatttgcgaaaatcgacggaactgttaaattcgaacgtttcggccgtgaccgcaaaaaagtgagcgtatatcctgtagctcaataatgattcaaaaaactccggtcgatgatgactggagttttttttgcaatatgcggagtaaacacctagaatgaaatgcagagtatgtgcgagcagaccccgccaagaatgagaataaacatctcaaacccactggatatgttccccaagcagtaatacataaaatgttctgcctggctgcaaatcaaccaaagccagaaaaaaggaacatgatatttctgggaaaaacaattgtttttctaacaaagccttctctgttataattcataatacacacttatacagactcctaaataagaaattaaatgattgggagtgcgaaaatgaaggatgtttcaaaaaatcaagaagaaaatataagcgacacggcattaacaaacgaactgattcatctgcttggccattcccggcatgattggatgaataagctgcagctgattaaaggaaacttaagcttacagaagtatgaccgtgtctttgaaatgattgaagaaatggttatagacgcaaagcacgaatcaaagctctcaaacctgaaaacaccgcatttggcgtttgattttcttacgtttaattggaaaacccattatatgacgcttgaatatgaagttctcggagaaattaaggatttgtcggcttatgatcaaaagctggcgaaactgatgagaaagctgtttcatctgtttgatcaagcagtcagcagagagagtgaaaatcatttaacggtttcgcttcaaacggatcatcctgacagacagctgattctgtaccttgattttcacggcgcctttgccgatccatctgcttttgatgatattcggcagaatggatatgaggacattgatatcatgcgttttgaaatcacgagtcacgaatgtctgattgaaattgggttggattagcggagtttttaacggtttagaacggaggacattatgtttgtagatcaggtcaaagtatatgtaaaaggcggcgacggcggcaacggtatggttgcgtttcgccgtgaaaaatatgtgccgaaaggcggccctgccggcggtgacggaggaaagggaggagacgtcgtttttgaagtagatgaaggtctccgcaccctgatggattttagatacaaaaaacactttaaagcgattcgcggcgagcatggcatgtccaaaaaccagcacgggcgaaatgctgatgatatggtcattaaagttccgccgggcaccgttgtgacagacgatgatacaaaacaggtcatcgctgatttaacagagcacggacagcgggctgtcattgcaagaggcggaagaggaggaagagggaatagccgctttgctacaccggctaatcccgcgcctcagctttcagaaaacggcgagccgggaaaagaacgctacattgttcttgaattaaaagtgcttgcagatgtcggacttgtcgggttcccgagtgtgggaaaatctactttgctgtctgttgtctcatctgcaaaaccgaaaattgcggactatcactttacaacgcttgtcccgaatctcggcatggttgaaacggatgacggacgcagctttgtcatggccgatttgccggggctgattgaaggcgcacaccaaggcgtcggactgggccaccagtttttgcgccatattgaacggacgagggttattgttcacgtcattgacatgtcaggcttagaaggccgcgatccgtatgaggattatcttacgattaaccaggagctgagcgagtacaatctgcgtctcaccgagcgtccgcaaattatcgttgcaaataaaatggacatgccggaggctgcggaaaatctcgaagcctttaaagaaaagctgacggatgattatccagtattcccgatcagtgcggtgacaagagaaggtctgcgtgagcttctgtttgaggttgctaatcagcttgagaacacaccggaattcccgctgtatgacgaggaagagcttacacaaaaccgtgtcatgtacacaatggaaaatgaagaagtgccatttaacattacacgcgatccagacggtgtatttgtgctttcaggagacagccttgagcggttattcaagatgactgatttctcacgtgatgaatcggttaaacggtttgcaagacagatgcgcggaatgggtgttgatgaagcactcagagaacgcggagccaaggatggagatataatcaggcttctggaatttgaatttgaatttattgattaatgaatgttggctgaaaagagagcctggtgtcaggctctctattttaaaggggggatgcaaatgaaagaggagacattttatcttgtccgtgaagatgtattgcccgatgcaatgagaaaaacattggaagtcaaaaagctgcttgatcgaaaaaaagcagattcagtagcagatgccgttcaaaaggtcgatttaagcagaagtgcgttttataaatacagagatgctgtttttccattctacaccatggtaaaagaacaaattatcacacttttctttcatttagaggataggtcaggtgcgttatctcagcttcttcaggcggtagctgattctggaagcaacgttctttccattcatcagaccattccgcttcaaggcagagcaaatgtgacactgtctatcagtacgtcggcaatggaagaagacattcatacattaatgaataagctcaggaagtttgattttgtagaaaaggttgaaatattaggttcaggtgcataagggagagaaaatcgtcatgaaagtcggttatttaggtccagcagctacatttacacatctagcagtcagttcttgttttcaaaacggcgccgaacatgttgcttaccgcaccattccggagtgtatagatgcagccgttgcaggcgaagttgattttgcttttgttcctttggaaaatgctttagaaggatctgttaatctaacaatagactatttaatacatgaacagcctttgccaatcgtgggtgaaatgacgttgccgattcatcagcacttgctcgtccatccctcaagagagaatgcatggaaagagctcgacaaaatttactcacattcacacgcgattgcgcaatgccataaatttcttcatcgacattttccttccgttccatatgaatacgccaattctaccggggcggcagcaaagtttgtcagtgaccatcccgagctgaatatcggggtcattgccaatgatatggcagcttctacatacgaattaaaaatcgtgaaacgggatatacaggattatagggacaatcatacaagatttgttatcctgtctcccgatgaaaacatatcttttgaagtgaattcaaaattgagctctaggcccaaaacgaccttaatggtcatgctgccgcaggatgatcagtccggggcgctgcatagagtgctgtctgcattttcttggagaaatttaaacctgtcaaaaattgagtcacgtccgactaaaaccggattaggccattatttctttattattgatattgagaaagcgtttgatgatgtattgattccaggggccatgcaggagcttgaagcactcggctgcaaagtgaggcttctgggtgcataccagtcttaccaattataaaaaaagcccactagagggctttttttagtctttaattaaaatgccggcttcttcgagggcttggcaagcttgatcgatgcgatgttcatcaggtgctgtcagtgtatgcaggtgcacgccgtcggtcagctgtgataagtaggcagcattcgtagaattgatttttttgatgaaatggctaacttctttccgggtgcctacttggatggctgcagttaaatctccgtatacgggatgctcgatttttacgtcttttactgtaacgccttcgtcgacgatgagctgcagttcctcttctgtccgttcaggaccgtgcagacatgctatgattctttctgcctgctggtgctgctgagcggctgcatccatgtatacatatccttggcttgtggcgataatcggtacatttttcgctttcaagagcgatatatcctgtacaataacctgtcttgagacgttcgctttttttgcgagttctcctcctgtcagcggtgatttagattccttcagccacagaagaagctggtcacgcctgttggcgcccattagctttaattcttcggtcaatatcaaattctcctttcttttgttcccaaagcactgtaaacgtatgtaataactgttccagctgttcagctgttgtatgcctgccaaaagagatgcggataaattgcagagcttcttgttcggtttttcttaatgctttcattgtttcagacggaccgtggtaacctgcagaacaagcgctgccggttgaaatgcaaatattactccgattacattctaacataacatattgtccttcaaatgagtgaaaaaaacaccctataatatgcggaagacattctgctttcgaagtgtctgctgcaagggttacagggagagaccgaatacggatttggtctagaaagtatgttcttaatgcctcattgcgggatatctgtttttccatttcgcttacgatcaattctgcagcggcagtgaaggcaccgatcccgggaacatttacggtgccggctctgaatccgtattcgtgagtagtcagatgataaacgggtttccaagggacatccggccggatatagaccgcccctactccttttggaccgtggattttatggctggacattgagagtgcatctactcccagattttttgtattgatcgggatctttccaaacgtttgaacagcgtcgcaatgaagaagaatccccttattgtgcaggtatgaagacaggcgttgaatgggctgaatgatcccggtttcagaatttgcatgctgaatagatacaaggcctgtttccggccggatatgggctagtaatatttcctcggtaataagcccgtattcattcggttcaatgactgttacatcatatccctgctgttccaaaaaagcagcgcaattatgaatggactgatgctccatggcagtcataataaaatgtcttttcgtttttggcaggccgtttagcaatgattgaatggccagaaaattggattcagtgccgccgcttgtaaaatagatgccgcttgcttctccgccaatgatgttggcgattttttcacggcagtactccagtatgtgctttgcttttcctcctgcatcatgcaggctgctggcatttccgtacatatccatactaagcttctgatatacagtaagggcttcctcacaaataggcgttgtcgctgcataatctaaataaatcatccggtcttcctccatccgttctccataaaaaactcttgagtttattttatccttgtgtaaatataggtgtcaagacaggtgtaaacaacaggaggatggcatatgtctaaaaagacgattgcagtcatcggttcaggggcggcggcactttccttagctgcagctttcccgccctcatacgaagtgactgttatcacaaaaaaaagcgtcaaaaacagcaattctgtctatgcacaaggcgggattgctgcggcctatgcaaaagatgactcgattgaagcccatctggaggatacgttatacgcagggtgcggccataataatctagctattgcagcagacgtattacatgatggaaaaatgatggttcaaagcctattggagcgtggatttccattcgaccgcaatgaacgaggcggtgtttgtcttggaagagaaggggcccactcatacaaccgcatatttcatgctggcggagacgcaacaggcgggctgcttatcgattatttgctcaaacggatcaacagcaaaatcaagttaatcgagaatgaaatggcagcagatttgcttatagaggacggacgatgtatcggcgtcatgacaaaagacagcaaagggcggctcaaggtaaggcacgcagacgaagttgtgctggctgccggcggctgtggaaacctgtttcttcaccatacgaatgatctcactgtcacaggtgacggtctttctctggcttaccgggccggggcggaattaacggatttggagtttactcagtttcacccgacactgcttgtgaaaaatggtgtttcctacgggcttgtttcagaagctgtcagaggggaaggcggatgtttagtagacgaaaacggccgcaggattatggctgaacggcatcccttaggtgacctggctccaagagatattgtctcacgggttattcacgaagaaatggcaaaaggaaatcgcgtttatatagacttcagtgcgatttctgattttgaaacgcgtttccctaccatcaccgctatttgtgaaaaagcaggggttgatatccacagcggaaaaattcctgttgctccgggaatgcatttcttaatgggaggtgtttcagttaatcgctggggagaaacgacagtgccggggctttatgcgattggcgagacagcatgctccggtttacatggagcaaaccggcttgcaagcaattctttattggaagcgctggtatttggaaaaagggcagcagagcatattatccaaaaaccggtttataacaggcaatatcaatcagggctagaaaccagtgtcgtctacgaggtgccggatatagaggtgtatgaactgcaaagcaaaatgacaagccacatgtctattttgcgggaacaaagcagtttgattgagcttagcatctggcttcatacgctgccttttcaggaagtgaatgtgaaggatatcacaattcggcagatggagctttctcatctatggcaaactgcaaagctgatgacgttttctgcgcttttgcgggaggaaagcagaggggctcacttccgcaccgattttcctcatgctgaggtgagctggcaaggaagacaaattgtccatacaaaaaaaggaacgaagatcagaaaaaacgaggggatttggaacaatgaatcatttacagctgaaaaaattactgaatcacttttttcttgaggatattgggacaggggatcttacatcgcagtctatttttggagaacagagctgtgaagcggagattgttgcaaagtcagagggtatttttgcaggagcagcgatcataaaagaaggcttttcgttattggacgaaaatgttcgaatcattttacacaaaaaagatggggacatgttgcataaaggtgaagtgattgccgagttacacggtcccgcagctgcgctcctttcaggagagcgggtcgtattaaatcttattcagaggctgtcaggaattgcgacaatgacaagagaggctgttcggtgtctggatgatgaacagattaaaatttgtgacacgagaaaaacaacaccggggctcagaatgctggagaaatatgctgtcagagccggcggcgggtataatcatcgattcggtttgtatgacggcatcatgattaaagataatcatatcgcagcatgcggctctattttagaggcatgcaaaaaagcccgtcaggccgcagggcacatggtaaatatcgaggtggaaattgaaacggagggacagctgcgggaagcaattgcagctggcgcggatgttattatgtttgacaactgtccgcctgatacggtccgtcattttgcaaagctcacaccggatcatataaaaactgaagcctccggcgggattacgttagaatctttgcctgcttttaaagggacgggtgtgaattatatttcattaggatttctgactcattccgtcaaaagtttagatatcagcatggatgttacgttatcaaatgaatctgtggaggaatgccgttatgtcaattcttgatgtgatcaaacaatcgaatgatatgatgcccgaaagttataaagaactatcgagaaaggatatggaaacgcgcgttgccgccattaaaaaaaagttcggcagcaggctctttataccaggccatcattatcaaaaggatgaagtgatacaatttgctgaccaaacaggcgactccctgcaattggcccaagtagcggaaaaaaacaaagaagcggattatatcgtattttgcggcgttcactttatggcagaaaccgccgatatgctgacaagcgagcggcaaacggtcgtcctgccagatatgagagcaggatgttctatggctgacatggctgacatgcagcagaccaatagggcatggaagaagcttcagcatatatttggagatacgatcatacctttaacttatgtgaactccactgcggagatcaaggcattcgtcggaaaacatggcggagcaactgtgacttcttcaaatgcgaaaaaagtgcttgaatgggcgtttacacagaaaaaaagaattttatttttgcctgatcagcatttagggagaaatacggcttatgatctgggcattgcgcttgaagatatggctgtgtgggacccgataaaagatgaattagtagctgaatccgggcatacgaatgtgaaagtgattttgtggaaagggcattgctctgttcacgagaaattcaccactaaaaatatccttgatatgagagagcgagaccccgacattcagatcattgtgcacccggaatgttcacacgaagtcgtgacactaagcgatgataacggatcaacgaaatatattatcgacacaatcaaccaggctccggcgggaagcaagtgggcaatcgggacagaaatgaatcttgttcagcggatcattcacgagcatccagataaacaaatcgaatcactcaaccctgacatgtgcccttgcctgacaatgaaccgaattgatttgccgcatttgttgtggtcgctggaacaaattgaaaaaggagaaccttcaggcgtcatcaaggtgccaaaagccattcaggaagatgcactccttgccctgaatcgaatgctttcgatcacgtagatcagaaatattttcccttcctttactcataacttcttttgttcaggcatatgttgtgaagaaacatattgtaatcacagctgaactgttcacgttttgcataggaggggaaaacgttgaaaatccatatcgttcaaaaaggtgatttgctctggaaaatagctgaaaagtacggagtcgatgttgaggaagtgaaaaaactcaatacacagcttagcaatccagacttaatcatgcctggaatgaaaataaaagtgccgtcagaaggagtcccggtcagaaaagagccaaaagcgggcaaaagtcctgcggccgggagtgtgaagcaagaacatccatatgcgaaagagaagcctaaatccgttgtcgatgtagaagacacaaagccgaaagaaaagaagtccatgccgtatgtcccgccgatgcctaatttgcaggaaaatgtgtaccctgaagctgatgtgaacgattattatgatatgaaacagcttttccagccttggtcgcctcctaaaccggaggagccgaaaaaacatcatgacggaaatatggatcatatgtatcatatgcaagaccaatttccacaacaggaggctatgagtaatatggaaaatgcaaattatccgaatatgcctaatatgccaaaggcgccagaggtaggcggtgtagaagaggaaaacgttcatcacacagttccgaatatgccgatgccggctgttcagccttattatcattatccggctcatttcgtaccgtgtccggtgcctgtttcgccaatttttccaggatcaggattatgctatccgtactatccggcacaagcttatccaatgcatccgatgcatggataccagccaggctttgtatcgcctcagtatgacccgggttatgaaaaccagcatcatgaaaacagccatcacggacattacggttcatacggtgcgccgcaatacgcatctccggcttatggatctccgtatggacatatgccgtatggcccttattacggcactccccaagtaatgggagcataccagcctgctgcggctcatggttacatgccatacaaagatcatgacgactgcggctgtgacggtgatcatcagccatatttctctgcgcctggccattcgggaatgggagcttatggaagccctaatatgccatatggcacagctaacccaaatccaaacccatattcggcaggagtttctatgccaatgacgaatcagccttctgtaaaccaaatgtttggccggccggaagaagaaaatgagtgatcgttcggaacgatgtaaatcgttcctttttttattttcaagctgatcactgccaaatggagagaactgacacgcttaacatgccccccatacgcacatgataaaagcgagcaaacatgctcaattcgtccacggggggtttttccattgggtaaaaaaatgacgatcgctagcctgattctaatgacagccggcttaacagcttgcggagcaaacgataatgctatgaatgatacgcgcaataacgacaatacccgtccaatcggatattattcaaatgaaaatgacgccgatagacagggagacggaatcgaccacgatggtcctgtttctgaattaatggaggatcagaacgacggtaaccgaaacaccacgaatgtaaataaccgtgaccgtgttactgctgacgatcgtgttcctttggcaactgacggaacatataacaacacgaataaccgaaacatgaatcggaatgcagcgaacaacgggtatgacaaccaagaaaacagaagactggctgcaaaaattgccaaccgtgtgaaacaagtgaaaaacgtcaatgacacacaagttatggtatcggatgaccgagtagttatcgcagtcaaaagccacagagagttcacaaagtctgacagagataatgtcgtaaaagcagcgcgcaactatgcaaatggccgtgacgtccaggtatcaacagataaagggctgttcagaaaacttcataaaatgaacaaccgctaggaaggaagggctgccggaagtgatattcggcagcctttttctttgcatcagcgaacaattcccattaaagtgtacatagaaaatgtaaaagaaggtgaaaacatggcaggccattccaagtggaaaaacattcaaaaaagaaaaaatgcacaggatgcaaagcgcggcaaaatatttatgaagcttgcaaaagaaatctatgtggcagcgaaagaaggcggagcggatccagaagcaaattcagcattgcgtcttgtcatcgaaaaagcaaaaggcgccaatatgccgaatgaaaatatagatcgggccattaaaaaagctgcgggaggccaagatggaagcagttatgaagaaatcacctatgaaggctacggcccttcagggattgccgtcatggttgaatgcgtaacagataataaaaaccgaacggcgtcaaatgtgcggacagcctttaataaaaatggcggaagtctgggagaaagcggatgtgtagcctttttatttgaacgaaaggggttcattacgatagaccgtactgaacggcaaatagaagaagatgagctcatgcttgatgtgcttgaagcaggaggagaagagctgcgaattgaagaaaacctatatgaggttttcacagagcctgagcattttgaagaggtgaaaacagccctcgaatcaaaatatctaatttcttcggcggaggtgaccatgcttcccaatacctatgcagaagccgatgatcaggctgttgagaagctggaaacattaatagacgtccttgaagatgacgatgatgttcaagaagtgtatacaaactatcgctcataaaaaaccggcacgatgtcaaatcgggccggttttagtatgttcaggagacacgttcactttcatgagtgtattctttctcccagaaatcagcgtttttgatacccagcgcttttggatcaaagaccgggtctaagccctgcttcttttggcgctcataatcctttaaagcaagaagcgccggtttggcaagcagcacaatggcaatgacgttcagccataccataatgccaagccctgcatcccctaatgcccaagcaagtgaagctgttttcacagtaccatagaacgtggcggctaaaataatcagttttaagccaagcatcgcccatttgctttctctgcctcgtgctaaataggcgatatttgtttctgcgatgtagtaatacgccataattgttgtaaaagcgaagaagaataaagcgatggcaacaaagcctgcaccgaatccgggaataacactgtcaattgccgcttgtgtgaaaccaggtcctgcttctacgcctttaagctggtgaacgataaaggaaccatctgcagcctgggtattgtacatgccggtaaacaagatcatgaaagctgtagcggaacatacaaacaaggtgtcaatataaacagaaaatgcctgaaccagtccctgcttgaccggatgagaaacctctgcagcagctgccggatgcgggcctgttccctggccggcttcgtttgagtaaatgccacgtttaacgccccaggaaatcgccatgccgatcaagccgccaaaagcggaatccaatgcaaaggcgcttttgaatattaatgagatcacagcaggcaattcagacacattcatgacaataataatcaaagacagcaggatatatccaatggccataaatggaacaatcatttgcgccgcattggcaattcgtttgacgccgccaaaaataatgaaccctaataataaaaccagaccacaccctgtgacgaaaggagagatgccgaatgcattttggatcccagccgcaatggagttggactgtacgcccggcattagaaaggccattgcaataagggcagcagcggcaaataagacggcaaaccacttaatgcctaagcctttttctatataataagcagggccgccccgatattgaccgtcttgtttcactttgtaaatttgagcaagcgttgattctacaaaggcactagccgccccgataaaggcaatcgcccacatccagaacactgcaccgggtccgccgaatgcaattgctgtcgccactcccgcgatgtttcctgtgcccacacggccggacagcgcaatcgataacgcttggaaagatgaaacgccggcttcagagctcttgcctttgaacatctgaacaatcatttcttttaaatgtcggacttgtaaaaaacgggtcataattgaaaaggcgaatccaattcccaataaaatataaatgaccggcgtactccataagaccgcattcaaactagcaacaaaatctgccatcaagcttccccctcacttcaaattcgaatacatgtataaaaaggattttggtctaatcgaactatttctacaatcgatttgtcacattatatgacctgtaattatcaatatgaagaggaagggaaaaagaaaaaacgcggcgtatcgattacgctgcgtttttctacagaggcaaacttatggcaattgttataaaatctttcagcaacaaatagcctagttcagtcaaaccgtatataaaggataaagcaatcacaaaatgattgaaatgcttgtcatcatttgttccgttcatcttattcatgtttcatcacctcactgacgcctgcggcggttcttcacggatccaatgatcatcttttcgccaatcatacgtttcatcagtatcaagatgtaaagtctgattgccgattttcactgtattgtgattgacccacgtcactgctgggcggctgtccgggtaattccagtagattgttctcttgacaagtgttttttcatttacaagttcacctctggctgcatctaagctcaaggtgttttcggatacataagtgtttaacgtataggtgccgtccggcgattcaaccgattggacgagattgcctttcggaacgttttttagtgaaaataacatccaatagatggcgccgccgaagaagaccagcagggcaaacataataagcgggatgttgctgcgtgtcttaatgtgactctctccctttttttctctcattttactatatatcggattcatatgatctttacatttctttaaaattaccttaataaagcaatgataagatgaaataaagccaataaagggtgaggggagacagaaatggaaaaaacgtattgtcattccggcgagaaggacccagaagcggtctacttaactgtgagaggctatcgaattaagctgtcgcctgaacaaatgaaactgatttctgccgtcagaaagtaaaaaatacatgataaaggcagccgcttgtgcggctgcctttttgatttaagaatattttcttttccgctgtgcgaaatgcttttgaaaccaatctttcttatataaaaatgcgatgatctcctgccaaaaacccggaatctttttggggaatatcggttttttgtagagtgcatgatatgcggattttaagtcgtcccactgcgtgcatgtttttgtctgctcaaatctcgcaacatcaatcacccgcaccgccccggtttctgtcaatatcagattccgcaaatgaatatctgacgggttcagtccggctgcccgggcgtcagaaagcgcttcttcaacctgctgaatcatgtcatcactgattgcaatgcctttcttcagacagttataaaaggtttcacctttaatatattccatgagaataaatgaatcgccagtttcgtaaatgtcaggatagaatgcggacccggctaatttttcatagatcgctgcttctttgactgctgtcgcttgatattccggaaaaaatactttcagcgccatttttcgaccgccttctgttaaggcaaacacataggcgcttcttcccttgccgattagtgttaattcctcggatttctctttgactttatcaaatctgctgttcttgcggtatatgacggaatgggccagtgcctctgcttttgtcagcatttcattcaccttctttgctctattttatgcagctgtttataggaaaatcataaactgttcaggaaaaagagcctaattctagtgtatctggtcttgaagaagaaggctacttataagcatgaattgtgataaaagagacatagaacgtttaatttccattcttgaaaagcgcttacaaatgggatagtattaattttaaataaagcgctttcgtgaatgatcaagggggaagaagccatgacaaaacagattgtgacagggattatcggtgcaggccgcatcggcaaacttcatgttcaaaatataagccggattcctcacatgaaaataaaagcagtctctgacattcaggcaagccgtataaaaagctgggccgacagtaatcagattgaatacataacctctgattatcgtgatttattacatgatcctgatattgatgctatttttatttgctctcctacagccgtacatgcacagatgatcaaagaagcagccgaggcgaaaaagcatatattttgtgagaagcccgttagtttctctctggacgaaacgagtgaagcgcttgcggctgtccggaaacacggtgtaacacttcaagtcggatttaaccgccgctttgatcctcattttaagaaaatcaaaacgattgttgaaaatggtgaaatcggtacacctcatttattaagaatcacgtcccgggacccagaacccccgaatatagattatgtccgtacgtcaggcggattgtttatggatatgtcgatccatgattttgatatggccagatatattatgggaagcgaagtgacggaagtgtatgccaaaggggcggctttggtgaatccttcttttgcggagctgggtgatattgatacagctgttattacactgacttttgaaaacggtgccatggctgtgattgataacagccgccaagctgtgtacggatatgaccagcgggttgaggttttcgggacgaaaggctctgcagcggctgacaatagcaggccgacaacggttgaggtgtcaacagctgattttgtgatgaaggataaaccgcatttctttttccttgaacgctataaggattcatatgaggaggagattctccgttttgcagaagcgatcggcacaaaccaggagactccctgcaccggcaatgacggtttacaggccggaaggatcgccagagcagcacagcaatcgcttgcttttggcatgcctgtcagcattgagcacactgaaaaaatcgctttttaatctaacaggattacaattcagcaagcttgggtatatactccattgatactttaagtaggcggtggagaaaatgaatacagtacatgctaaaggaaatgttttgaacaaaatcggaattccttctcacatggtttggggttatattggcgttgtcatctttatggttggagacggcctcgaacaaggctggctgtctccttttctcgttgatcatggtctcagtatgcagcaatccgcatcgttatttaccatgtacggcattgctgtcaccatctcagcttggctttcaggaacgtttgtccaaacttgggggccgagaaaaacgatgactgtcggattgcttgcatttatcctcggttcggccgcttttatcggctgggcgattcctcatatgtattatccggctctcttgggcagctatgctcttagaggcttgggatatccgctgtttgcatactcttttctcgtatgggtgtcatacagcacctctcaaaatattcttggaaaagccgtcggctggttttggtttatgtttacgtgcggccttaacgtgctcggcccgttctattccagctatgcagttccggcctttggagaaatcaatacgctttggagcgctttactgtttgtggcggcaggcggaattcttgccttattttttaacaaagataaatttactccgatacaaaaacaagatcagccgaaatggaaagaactgtcgaaggcatttacgattatgtttgaaaacccaaaggtaggcatcggcggagtggtcaagacgattaatgcgataggacaatttggatttgccatctttcttcctacttatttagcacgatacgggtattcggtttcggaatggctgcaaatatgggggacgctgttttttgtgaatattgtgtttaatatcattttcggtgcagtcggagatagacttggctggcgcaatacggtcatgtggtttggcggtgtcggatgcggtatttttacgctggcgctgtattacacgcctcagctgatcgggcatcagtattgggtgctcatgattatcgcctgctgctacggcgcggctttagcagggtacgttccattaagcgcgcttttgccgacgcttgcacctgataataaaggtgctgccatgtcagtgttgaatttgggatctggtttatgtgcgtttatcgcgccgggcatcgtgagtcttttcattgggccgctcggtgcaggcggcgtgatttggatctttgcggcattgtattttttcagtgcctttctgacgcgattcttgacaatttctgagcaaagcacaggtgtgtatacggaggaacggtttgtcagggaaaatgtgcagacaaattttgataaaacggttaagcagtagcctctttggtcaaactaatcataaacgtgtgcaaagaggtgtagagggtgaaacgattcagcacggcgtatcttttgctgggcattctttgctcagcggcagtatttttaataggagctccttcccgcgcacttggcgcggaagtggagcactatgagccgctgcaggtgcatgtgcagcttgaaaaggtgtatttggacggcgatgtcagcattgagcataagcatgaaaaagtgttttctatggatgatttttgggcagcttatgccggatggacgcttgtggaacaaaaaaagggatatgtgctcttccggaagcaaatggacgatatatctccgctcagcaaggtcaacgggtatatcggtgtatcggataatggagtgatttccacttttcatgggcggcctgagccagcttccgaaccaattcagtctttttttcaaattgatttagaaaggctggaaagccatatgcaaaaaaatctgctgaaaggcattccatttcggacaaaagcggagtttgaggatgtcatcgaacatatgaagacatacagcgggtaacgtccgctgattgaagacatgtattcatgtcttttttttcgtgaaagaatgagagagaagcgaacatatgttaacttttctataagactttggctgtttttatggtacaatgaagaacagtcaaagaggtgaatttgcgtgattgaatttgttaaagggacgattgattatgtatctccccaatatattgtcatagagaacggcggcatcggctatcagattttcacgccgaatccgtttatatataaggagagaagccaggaaacgatttttacataccatcatatcagagaggatgctttttcgctttacggtttttcaacaagagaggagaaggcgctctttacaaagctgttaaacgtgaccggaattggcccgaaaggagcacttgccatcttgggctcgggtgatcccggagcggtcatccaagcaattgaaaatgaagatgaagcttttttggtcaagtttcctggagtaggaaagaaaaccgcacgccagattattctagatttaaaaggaaagctggcagatgttgtgcctgaaatgattgaaaatctgtttaatcatgaagaaaggcttgaaaagcaaacagcggaaacggctcttgaagaagcacttgaagccctcagggttctcggatatgctgaaaaagaaatcaaaaaggtgcttcctcaccttaaagaagaaattgggctgacaacagaccaatatgtgaaaaaagcattacaaaaactattaaagtaaggtgatgttcatggatgaacggctcgtctcaagtgaagcagacaaccatgaatcagtgatagagcaaagcctgaggccgcaaaatctggcacagtatatcgggcagcataaggtaaaagaaaatttgcgcgtgtttatagatgcggcgaaaatgagacaggagacgctggatcatgttcttctgtacgggccgcccggactcggaaaaacaacgcttgcttcgattgttgctaatgaaatgggagtggaattgcggacgacatcagggcctgctattgaaaggcctggtgatttggctgctatattaacggcgctggaaccgggagatgtattatttattgatgaaatacataggctgcacagatcgatcgaagaggtgctttatcctgcaatggaagacttttgcctggacattgtgattggcaaaggcccatctgcccgctcggttcggctcgaccttccgccttttacgctggtgggagccacgacgagggtggggcttttgacggctcctttaagagacagattcggcgtcatgtctcgccttgagtactatacacaagaagaactggcggatattgtcacaagaaccgctgatgtattcgaggttgagattgataaaccgtcggctcttgaaattgcaagaagatcgagagggacgccccgcgtggcgaaccgcctgctgagaagggtgcgcgatttcgcccaagtgctgggtgacagcaggattacggaagacatttctcagaatgcgctggagcggcttcaggttgaccgtctcggtttggatcatattgatcataagctgctgatgggcatgatcgaaaaattcaacggcggcccagtaggccttgatacgatttcagctaccatcggcgaggaatcgcatacgattgaagacgtatatgaaccatatctgctgcaaattggatttatacaaagaacgccgcgtggaaggatcgtgacaccggccgtttatcatcatttccaaatggaggctccccgatatgactgaatttcctaagatcatcatgattcttggtgctgttttgcttattatcggagcagttttgcattttgtcggcaagatgccgggagatatttttgtaaaaaaaggaaatgtcacgtttttcttcccggttgtcacttgtattattataagtgtggtattatcaattttgcttaatctttttggcagaatgaaataacaaaagactagaataaaggtgaaatcatcatgaaagtcgatttatttgattttgaactaccagaacgtttaattgcacaagtaccgttggagcagcgtgatgcttcaaggctgatggtgctcgataaacatacaggagagcttactgacagctcgtttaaacacattatcagcttctttaacgaaggcgattgtctagtcctgaacaatacccgggtactgcctgcgcggttattcggcacaaaagaggataccggcgcgaaagtggaacttcttttgttgaaacaggaaaccggtgataaatgggaaacacttgccaaaccggcgaaacgggtgaaaaaaggaactgttgtcacatttggagacggaagattgaaggcaatctgcacggaagagcttgagcacggcggcagaaagatggaatttcaatatgacggtattttctacgaggtgcttgaatcccttggagagatgccgctccctccatatatcaaagaacagcttgatgacaaagagcgctaccagacagtgtattcaaaagaaatcggctctgctgctgcgcctacagctggccttcacttcacggaagaaatcttacagcagctgaaagacaaaggcgtgcaaattgagttcatcacactgcacgtaggccttggaacgtttcgccctgtgagtgccgatgaagtggaagagcataatatgcatgcagagttttatcaaatgtcagaagaaacggctgcagccttaaacaaagtaagagaaaatggcggtcggatcatttctgtcggcacgacctcgacacgcacgcttgagacgattgccggggaacatgacgggcaatttaaagcatcaagcggctggacatctatttttatttatccgggctatgaatttaaagccattgacggaatgattacaaacttccatttgccgaaatcgtcattgattatgctggtcagcgcgcttgctggaagagaaaacattctgcgtgcctataatcatgcagtggaagaggaataccgtttcttcagcttcggagacgcgatgctgattatataatttgagaacaggaggcctcatcaaaagtggctgaacaaccaatacgctatgaatttataaaagaatgcaaacaaacaggagcgcggctgggcaaagtgcatacgcctcacggctccttcgaaacgccggtttttatgccggtcggcacactggcgacagtcaaaacaatgtcgcctgaagagctgaaagcaatggatgcaggcatcattttgagcaacacttatcatctatggcttcgtccgggccaagacattgtcaaagaagcgggcgggctccataaatttatgaactgggaccgcgcaattttaacagattcaggcggctttcaggtcttttctttaagcaagtttcgtaatatagaggaagagggtgtccatttccgcaatcatctaaatggagacaagctgtttttatctccggaaaaagcgatggagatccaaaacgcactcggctctgatattatgatggcgtttgatgaatgcccgccatacccggcggagtacgactacatgaagaggtcagttgaacggacaagccgttgggcggaacgttgcctgaatgcccacaatcgtcaggatgaacaagggctgtttggtattgtacaaggcggagaatatgaagatctgcggacacaaagtgcgaaggacttgatttcccttgattttccgggatatgctataggcggattgtctgtaggtgaaccgaaggatgtcatgaaccgtgtactcgaatttacaacaccgctcttgccgaaggataaaccgagatatctgatgggagtaggttctccggatgcactgatcgacggagcgatccgcggggtcgatatgtttgactgtgtgctgcctacacggattgcaagaaacggcacagtgtttactgctgaaggacgactcaatatgaaaaatgcgaaatttgaaagagacttccgtccgattgatgaagagtgtgattgctatacatgtaaaaactacactcgcgcgtacattaggcacttgattcgctgtaatgaaacattcggccttcgattaacaacttaccataaccttcattttctgttacacttaatagagcaggtaagacaggctattcgcgaggatcgtctgggtgatttcagagaagagttctttgagcgttacggctataacaagccaaatgcgaaaagcttctaaataaacataacaggcttacagaaaggggtgaaaatgatgactggcactttaggtacattggttcctattattttaatgtttgcggtcctttacttcttgctgattcgtcctcagcaaaagcagcaaaaggctgtacgccaaatgcaagaggaactgaaaaaaggcgattcagtagtgacaatcgggggattgcacggtactgttgactctatcgacgaaagcaaagtcgtaattaagactggtgataacacacgtcttacgttcgaccgccgcgcgatcagagaagtttctgctgctgaataacagcaggagctatacatagcaaacaaaaaagagcgggcaagtgagcccgctcttttttatgtggaagacctgtttcccctcatgttcacgccgaaaatcccgcccagcatgcacacccctaaaaatcccagatggaagatcagctgttctgctgtaaatgtctttccgaatcctaaatactgaaacaataagataatcagagaaaaacttaaggcagtcaatgctccaatcatccagcctctttccttgcctttcccgcctgaaatgaacccgccgataaataaagagagaaatgagatagctgtgatcagccagttaaatgatgattcttccagcgaggttgcggtcaataaaagtgaaaccgccaaacttgtcaggagcatggctgcaaatatggcgattaagccgtaaagaatgccttttccaacttgtttcgtctcctccatgattgtctcctttctgcctgtattaaaaggcttctgttctttttgcacaaagccgtcagacatgctgatggctcgtctttgtaaaaatgtattcccttatcccatgaattagacgtaaaagctttgtgaaatgcaatcggtttttcttacataaattgatcattttgttgcaacctataatgagttggaggtgcatgatggaagagcttctcactattgcgtttcgcacagtcgtattgtattttgtgatattgatcatttttcgtctcatgggcaagcgggagatcggagagcttagtatattagatctcgttgtctttatcatgatggctgaaattgccgttttagccatagaaaacgtagacgatcatctatttcataccattttgccaatgcttgtattaatgatcattcaagtgactttggcatacttttctttaaaaaaccgaaaagtccgccagcttcttgacggtaagccgaccataattatcaaatatggaaaaattgacgaagacgccatgaaatcacagcgttataattttgatgatttaatggttcagctcagagaaaatagcatcgacagagtagctgacgtatcatttgctattttagagccgtcgggcaaactgactattgttaagaaagaaaacagcggagagcatcgacagctcgaaatgccgctcattatagacggcttcattcaaacagaaaacctgtccagaatcagtaaagataaaaaatggctgctcgaaagtttgcaaaaacacggatacacaaacccttcagatatttctttttgctcgtttacagacggagaattatttattgatgaaaaagatgggcaccgcccgtaaccgttatcggacgattagacgtccgataatgggaatgcggcgaagctcatcttttttaattaaacggaaaacgagcaggaggattatataaatggcggcgctcaccgcaatccatccggctagattgacagcctcagatgctccaaagcttatataatgtttgatggcggagctgatgaatccgcaaattacaataacagcgaagctgagcgcgtactccttgattttgatgctgatcggcagcactttgcttacggttgctgcgtgcaatagcgtgacgagcaccatgcctgtcacaatggctaatgccgcgcccataatgccaagagaaggccttgtggcaaggacaaaaataaggcctgttttgactagcgctccgattaagctgttcatcatcgcagctcctgccaaattaagcgcctgcagcacagcttgaagcgggccttgaaaataataaagcagaaaaaacggggccatcacttttataaatacagctgcgcctgaagaaccgtacatcactctcatcagctcatccgcaaatacaaataaaataacaactgaaatgcctccgctgagcagacagagacgcatcgcctgttccaagcggtattccaccacctgcaattttttctgctccattccttcactgatcgcaggaacaagcgcggtcgacaaagaatatgtaataaagctgggcagagtcagcagcgtcatggcaaagccggtcagttccccgtattgctttgttgcggcaactgttgccacaccggcgatggcaaggctttgagcgacgacgattggctcgaaaaaccaagagaggtttccgataaagcggctcccggttgttggaagggacacgctcattaattgggtaaaggtttgttttccgtttttaattgactggaaaaaatgctttctgattttaattgtctttttatacttaaagcaaacgaataaataaagaagtgatgccagctcccctgccactgaggatagcattgcccccgctgcagcatattcaattccgtaagggagaaaaatcgttgtgcagacagccacgagtgaaatgcggacgacctgttcaaggacttgtgacatagcaagcgggttcatattctgttttccttgaaagtatcccctcagcacactcgatatagcaataatcggcacaaccggcgtaatggccaagagcggatacagtgttcgcttatctgtcagcatcgtttcagccataaccggggcgaaaaacagaaacagcggtgtaaagatgaggctgagcactcccgtgatggtcagagacatgactaaaatatttttcgttttttgatgatctccgcgcgcactggcttcagcgactagcttgctgatcgcgaccggcagaccgaattgagttaatgtagtggccaagaagaaggtaggcgctgccatcatgtaaagcccgactccttcttcaccgataaaacgggcgataaccacccggttgacaaacccgagcattcttgtaaccattcctgctgcgataaggataagagtgccctttaaaaacgtctgtttcgccatttttaccccctgccttctcaaactacctggaatcatatacaataaagatatgcgtatatgtcgtccaagcatgacaagtcttcttgaaaaacaataaaaaaggagcgtggaattcgtggagaagcatccagccgatctatataaagaccacgtcaggccgtttctttacagcaaactggaagagtttaagattctcgggtatgatgatgttgaactcgaaagtttgtggtcatacttaacagataagaagtggaaaaagaaaacggaactgagcatttatgaactggcgagtgatattttatcagtgaaaattggcgaatttatgaactatgcaaccgttgagtcatttaaaacgtctaattggctgggcagtgaagagggccaggaagcattggaagaactgctgagatagcaggttgattcgcacaggtttaagggaggatatacataatgaaaaaaggacgcttgattgcgtttttccttttcgttctattgatcggcacgggcttgggctactttacgaagcctgccgctaacaatattacgttaggattggatttgcaaggcggatttgaggtgctgtatgatgtacagcctgtaaaaaaaggtgacaaaatcacaaaagacgttctggtcagcacagtagaggcactgaaccgccgggccaatgttctcggggtcagcgaaccgaacatccaaattgaagggaataaccggattcgcgttcagctcgctggcgtgacaaaccaaaacagagcgcgtgaaattttggcgactgaagcgcagctttctttcagagatacgaatgacaaagaattgctgaatggctctgacctcgtcgaaaacggagctaaacaaacgtatgacgccaaaacaaatgaaccgattgtcagcattaaactaaaagatgctgataaattcggcgaagtgaccaaaaaggtcatgaaaatggcgccgaacaaccagcttgttatttggatggattatgaaaaaggggattcctttaaaaaagaggttcaaaaagagcaccctaaatatgtatccgccccaaatgtaagtcaggaattaaacacaactgacgttacaattgaagggcaatttacggttcaagaagcaaaagatttagccagcattttaaacgcaggcgcacttcctgtgaaactgactgaaaaatattcaacatcagtaggcgcacaattcggccagcaggctctccatgatacggtgtttgccggtattgtcggtatcgcaattattttcttatttatgcttttctattaccgtctgccgggattaatcgcggtgattacgctatctgtttatatctacattacactccagatctttgactggatgaatgccgtactcacgcttccgggaattgccgctctcattttaggtgtcgggatggctgttgacgccaacattattacctatgagcggattaaagaagagctcaagctaggaaagtcagtccgctctgccttccgttcaggaaacagacggtcatttgcgacgatttttgatgcgaatattacaaccattattgcagcggttgtgctctttatctttgggacaagctctgttaaagggtttgcgacaatgctgatcctatcgattttgacaagctttatcactgccgttttcttatcgagatttctcctcgctctccttgtggaaagcagatggcttgatcggaaaaaaggctggtttggtgtcaataagaaacatatcatggatattcaggatacggatgaaaatacagagccgcatacgccattccaaaaatgggatttcacgagcaaacgcaaatacttctttattttctccagtgcagtcacggttgccgggattattatcctgcttgtgttcaggctgaatcttggcattgactttgctagcggtgcacggattgaagtacaaagcgaccataagctgacgacagagcaagttgagaaggattttgaatctctgggtatggaccctgatactgtagttctgtcaggcgaaaagagcaatatcggtgttgcccgttttgtcggggtgccagacaaagaaaccatagcaaaagtaaaaacgtattttaaagacaaatacggatcagagccaaatgtcagcacagtttcaccgacagtcggtaaggagctggcaagaaatgcgctgtacgcagttgctatagcttctattggcatcattatttacgtttcaatccgattcgaatacaaaatggcgattgctgccatcgcctcattgctatatgacgcattctttatcgtcacgttcttcagtattacaaggcttgaggtagatgttacgttcatcgcggccatcttgacgataatcgggtattccattaacgatacaatcgttacatttgacagggtccgcgagcatatgaaaaagcgtaagccgaaaacatttgccgatctgaaccatatagtaaacctgagcctgcagcaaacctttacacgttcaattaacactgtattaactgttgtgattgttgttgtgacattgctgatctttggagcatcttctattactaacttctcaattgctttattggtcgggctgttaacaggcgtttattcttctctatacattgccgcacaaatttggcttgcatggaaaggaagagaactgaaaaaagattcggcgcaataaaaaatatcaggctgtcctctgcagggcagcctgttttttgaagtttcattgaacttaaaatagacatttgctataatgacatacgcttacatttaaacatatatatggtgttaaaagtgtttatgactggttttcagatatgtaggagggtttatatatgagggttcgcgaatcagagctgccgggcataggacaaaaagttgaaatgattactagaaaccgtgataaaatttcaattatcattcatcatgacggacggagagagctttactattttgaccaaaacgaccatgaggaatgtgttgcctccgtgcagtttgatgacgctgaagcaaggcaaatgtctgcaattcttggcggaatggcatataaaccgaaagcattagaacaggtcgagtcagcccttgatgatttgattatagagtggtgtaaagcagaggcgggagcgcctgccattcatcagacgattggtgatttgaatgtgggtcaggaatatcatgtgacggtcattgcaattgttaaaaagaatcaggataaacaactgaatccgagctctgaaacagtcattgacgaaggcgatacacttgtgatttccggtgagggaaccggactgaagaggctgatccgggaaaaattaacagcgaagggatcttaacccagtgttaagccatgtttaaaaccagtcttgatggggaaagttacctcaataagaagtttgggggaaaagagaatgaataaacaatggaccattattttcgcacttattttcaccttaattgtcgctattttcgcagtcattaatgttcgatccgtagaagttgattacctgtttggaagatcagaatggccgctcattcttgttattttgggctcagttttaatgggagcgctgatcgtattttctgtcggcatttttcaggtaatgaaattgaagcgggaaataaaaaccttgcggaaagaaaatagaacagcaatacataaacaagaggatactcatcttgctgatcagactgacacacaggatgcatcagccatgattgagaaaaaagactagttttcgaatattatttgaaacccctcagcctgctctagtataatagggtggttgaggggtgaatttatgttagcgtcaaaaatgcgatgggaaatccagcgaccagatcaggataaggtcaaatcactcacagaacaattgcatataacacctcttgttgcgtccctgcttgtaaaaagaggctttgatacggcagaaagcgctaggctgtttttacatacaaaggatgccgatttttatgatccttttgaaatgaaaggcatgaaagaagcggcagatcgaataaaacaggcgatttcacaacaagaaaagattatgatatatggcgattatgacgccgatggggttacaagtacgtcagtgatgcttcacacgctgcaaaaactgtcggctcaagttgatttttatatacctgaccgttttaaagaaggatatggacctaatgaacaggcgtttcgttcgattaaagaacggggcttctctttgatcattacggttgatacaggaattgccgctgtgcatgaagcgaaggtggcaaaggaactcggactggatgtcatcattaccgatcatcatgaaccgggaccggagcttccggatgtccatgcgatcgtccacccgaagcagcctggctgcacttacccgtttaaagagcttgccggggttggagtcgcgtttaagcttgcccacgctttattgggtgaacttcctgatgaactgcttgacctggcggctatcggcaccattgccgatctagtcccgctgcatgacgaaaacagattaattgcaacactaggacttgaaaggcttcgacggacaaatcggctcggcttaaaaaagctgattaagctgtcaggcggagacatcggagaagcgaacgaagaaactgtcggatttcagctcgcaccaaggctgaatgccgtcggaagaatcgaacaggcagatcccgctgttcatttgcttatgtcagaggattcgtttgaagcggaagagcttgccgcagaaattgaccagctgaacaaagagcgccaaaaaatggtcagcaaaatgacggatgaagcgattgaaatggttgaacagcaagggctcgatcaaactgcaattgtcgtggccaaagccggatggaacccgggagtcgtcgggattgtggcttcaaagcttgtggaccgtttctaccgaccggccattgttcttggcattgatgaagaaaagggaatcgctaaaggttcggcccgaagcatcagaggatttaatttatttgagagcctttctgaatgcagagatattcttcctcatttcggcggccatccaatggctgcggggatgacgctgaaagccgaagatgtgccggatttgcgaagcaggctgaatgaaatagcggacaatacgcttacggaagaggattttattcccgtacaggaagtcgaccttgcctgcggcgtcgaagacattacagttgaaagcatcgcagaaatgaacatgctgtctccttttggcatgctgaacccgaaaccgcatgttctcgtagaaaacgcagtactggaagatgtccgcaagataggggcaaataaaactcatgtcaaaatgacgatcagaaacgagtcgtcccagcttgattgcgtcggttttaataaaggcgagcttgaagaaggcatcgtaccgggttcaagaatttctattgtcggtgagatgtcaatcaacgaatggaacaatcgaaaaaagccgcagcttatgataaaggatgccgctgtttctgaatggcagctgtttgatttaaggggaaaacggacgtgggaagacacagtttccgcccttccatctgctaaacgggccattgtctctttcaaagaagactcaacaacactgcttcaaactgaaggccttcgccgagaagtgcacgtcatcagttctaaagatcaagcaaaggcgtttgacctcgatggtgcatatattgtattactggatccgccgccttcgctggacatgctcgcacgtttgctggaaggaaaggcgcccgagcggatatattttatttttctcaatcatgaggaccactttttatcaacttttcccgcaagagaccactttaaatggtattatgcgttcttgctgaaaagaggcgcttttgacgtgaaaaaacacggttcagagcttgcaaaacataaaggctggtccgttgaaacaatcaatttcatgacaaaggtgttttttgatctcggttttgttaaaatagagaatggtgtgctgtctgttgtgagcggagcaaagaaacgcgacttaacagactcacaaacatatcaggcgaaacagcagctgatggaactggatcaaaagctgaattattcttctgctgaagagctgaaggaatggctgaataagctgatgaaacaagattcagaggcttatgaaagtacgaggaggacataaaacagatggatttaaaacaatacgtaacaattgtaccggattacccgaaagagggcgtgcaatttaaagatattacgacactgatggataaaggcgatgtataccgctatgccacagatcaaattgttgaatatgcgaaagaaaagcaaattgatttggtcgttggccctgaagcgcgcggctttattatcggctgtcccgttgcttacgcgcttggcgtaggttttgcgccggtccgcaaagaaggcaagttgcctcgtgaagtaatcaaagtggattatggcttggaatacggaaaagacgtattaacgatccacaaagatgcgattaagcctggtcagcgtgtgcttattacagatgacctgcttgcgacaggcggcacaattgaagcgacaatcaaacttgttgaagaacttggcggcgttgttgctggtatcgctttcttaatcgagctttcttaccttgacggcagaaataagctcgaagattacgacatcttaacattgatgaaatactaaggataaccgcataacgaaaaagcactccatgtcagggtgcttttttcctattgttttgcatttattttatataatatttggctatttgaacttctgctctttacatctttcgtttttttcttgataataaactacaatacagtttacattttaaaaaaggtgattccatggcgaacgaacaagtattgactgccgagcaagttatagataaagcgcgcagctatctatctgatgagcatatcgcatttgtcgaaaaagcatatctgtacgctgaagatgctcatcgcgagcaataccgcaaatcgggcgagccatatattattcatccgattcaggttgcggggatactcgttgatcttgaaatggacccttccacaatcgcgggcggatttttgcacgatgtcgtggaagatacagatgtgacgctcgatgacctgaaagaagcattttccgaagaagtggcaatgcttgtagacggcgtaacgaaactcggcaaaattaaatataaatctcaagaggaacagcaggcggaaaatcatcgcaaaatgtttgtcgctatggctcaagatatcagggtcatattgatcaagctggcggatcgtcttcacaatatgcggacactgaaacatctgcctcaggaaaaacagcggagaatctccaatgaaacgctggaaatttttgctcctttggcgcatcgtctcgggatttcaaaaattaagtgggaattggaagatacggcgctccgttatttgaaccctcagcaatattacagaattgtcaacctcatgaagaagaaacgtgcagaacgagagctttatgtcgatgaggttgtcaatgaagtgaagaaacgtgtcgaagaagtaaatatcaaggctgacttctcgggacgcccgaaacatatttacagcatttatcgaaaaatggtgctgcaaaataagcaattcaatgaaatttacgatttgttggctgtccgtattcttgtgaatagcataaaggactgctacgcggtgcttggcatcattcacacatgctggaaaccgatgccaggcagattcaaagattatatcgcaatgccgaagccgaatatgtatcaatcgcttcatacaacggttatagggcctaaaggcgatccgcttgaagtgcagatccgcacctttgaaatgcatgaaatagcggaatacggggttgcggctcactgggcttataaagaagggaaagcagccaatgaaggtgcaacctttgagaaaaagctttcttggttccgtgaaattttagaatttcaaaatgaatcgacagatgcagaagaatttatggaatcgctcaaaattgatttgttctctgacatggtgtatgtctttacgccaaaaggagatgtaatcgagcttccgtccggttctgttccgattgacttttcttaccggattcactctgaaatcggcaataaaacaatcggtgccaaagtaaacggaaaaatggttacgcttgaccataagcttcggacaggtgatatcgttgaaattctcacctctaagcattcctacggtccgagccaggattgggtgaagcttgcccaaacatcccaagcgaagcataaaatccgtcaattctttaagaaacagcggcgtgaagaaaatgtcgaaaaaggccgtgagctggtcgaaaaagaaattaaaaacttggattttgaattgaaggatgttttaacgccggagaatattcaaaaggttgctgacaaatttaatttctcaaatgaagaggatatgtacgcggcggtcggttacaacggcatcacagctctgcaggtggcgaaccgcctaacagaaaaagagagaaagcagcgcgatcaggaagaacaggaaaagatcgttcaggaagtcactggggaacctaagccatacccgcaaggaagaaaacgggaagctggcgttcgtgtcaagggcattgacaacctccttgtccgtttatcaaaatgctgcaatcctgtgccaggtgatgatattgtcggctttatcacaaaaggcagaggggtttcggtccatcgcgaagactgtccgaatgtcaaaacgaatgaagcccaagagcggctgatcccggtagagtgggagcatgagtcacaagttcaaaagcgcaaggaatacaatgttgagatagagattcttgggtatgaccgccgcggattgctgaacgaggtgctccaggcagtgaatgaaacgaaaacaaatatttcatctgtctctggcaaatcggatcgcaataaagtggcaaccatccatatggcgattttcatacagaatatcaatcacttgcacaaagtcgtcgagcgtattaaacagattagagatatctactctgtgcgccgcgtcatgaactaaaggggttagaaaatgagattagttgttcagcgagtaacagaagcaagcgttacagtggacgaagaggtcgtcggccaaattggacaaggccttatggtgctggtcggcatcactcacgatgatacagaagatgatgcagcttatttagccgataaagttgtcaatctccgtattttcgatgacagtgaagggaaaatgaatctgtctcttgtagatataggaggagagattttatccgtctcacagtttacgctttatggagatacgaaaaaagggcgccggccgaactacatgaacgcggccaaacctgataaagctttaggtctttatgaaaaatggaatgacctgcttcgtgaaaaaggaatcaaagtggagaccggaacgtttggagcaatgatggatgttcagcttacaaactccggaccggtcacgctcattatggattcaaaataaaaaaagctgccaaaaggcagctttttttattggaagtatttctctaatccgctttcgatcccatctgttactttttcttggtatgaattgctatgtacaatggcttcttcctgcggatggcttacatatcccagctcgtacagcatagcgggctgtctgttttcccggagcacataataatctccgaataatacgccgcggtctggaatggaagaacgcttcaccacttctgagtggacatctgatgcgagttcctgatctttggcaggactgtagtaatatgctgtactgcctcttgtagaggtatccgcatagctgtcataatgaatgctgataaaggcgtcagcgttgcggtagtgagacgtagagacccgtgactgcaggctgacaaaggtatcatcctggcgtgtcacatatacatccgctccagccgatctaagtttgctggcgagcagttttgccgttttgatcgtcaggtttttctcgaatttccccgaatacccgatcgttccgctgtcttttcctccatgtcccgggtcaacaataatcgttttattgtttagagagccgtttccagacggggaatcagagactggcggttcacctgcttcttctgcgcttttagacgtttggaccacccaattggctacataagcagtttgcccgttatcaagctttatttcataccagcttccctttgaaccggtaatggtgtatgaatctcctttggcagcgcgctcaacgatcgaagctgatgttgacgcatcacttcttagattcgttcctccgtacatgatataggcttttttagcggaggatgaactgccggcatttgctgaatcatcagctggaacagaactagtcaaaaggtaatggcttgcaacccagccttttagcccgttcacctcaatgtgagcccagccatttttctcgttgagaaccgtcagtttcgttccgcgatcaagttttgttataattgccgcgtcatgtgaggcggaggctcttacatttagcgaagaaacaccgactgtgcccgtcgttgacgcaccggaatccttggtttggtcattctcatcagacgctgaactgctgcctcctgatgtgacatattcagatgatacccatccggtggcactgtgataggatatcttgatccagcccgaatctttatcaatgacagatgcttggctgccttgcgggaatttgccgatgacttcgtaggaagtgcccgggccgcttctcatccgcagatcggggtctgttgatgtcacagtgtcactgcttcctgaggagcttgtgctggcctggtcttcctttgtaataagccaggagactacccagcccttttctccggaaccaagctgtatctgcacccagtctccatcttcctttaaaatcggatagcgttctcccttttttacttccgctgtaatgccgtagctaagcccagggccgcttctgacgttcatttcatctgttgcgatgaccgcttctccttgagcagctgtaacggatgaagaggtcgggaatagcgctgcggtgaaaataatacatacaataaggacaaagtatttcttgttcattgtgtcctcctttctgatgatcattaaaaaaagcattcttgtttaatatcgtaaagtcctttctgatttttaaataaaaataaaatgatttgtttatactaagcgtaaatacaatcaaaaaggtgtgcaaatcatgaaatatcatccaaaaatgggacgtgcatttcacgacggtgaagcgaatctgcattacagcgatcacgcagatcccgatacgactggttatcttacggaaacagcatctgaatttggtcttatgtccaaagaagcagcgctgaggaaaaacaaccggaataaagcttgacagagaaccccaatcccattattataatagaaattgagtacatagcaaatgatgaaagatttgaaccaataatggagaagagtaggtcagattgcatgattagagaggaacccgccctaggctgaaagcggatcccattgcgtctttctcgaaacaacactccggaggtttcctgctgaacgcgtgaataacgccattaggcagtgaacgtgaacctgcgttaaaggatcgagcgggaatatgaacgtattccaactagggtggcaccacgggtataactctcgtccctactatcatgtatagtaggggcgggagtttttttcattttcatcattaacgatcattggatattttataaggaatacataaggaggtctacctatgggatataacattccgagaggaacacaggatattctgcctggagaatcagatcgctggcagtatgttgaacaaattatgagagacacttgccgcacttatcaatataaagaaatccgcacaccgatttttgagcatacagaactgtttgccagaggcgtcggagaatcaacggatatcgtacaaaaagaaatgtataccttcgaggaccgcaaaggcagaagcctgacacttcgtccggagggaacagctgctgcggttcgcgcttttaatgaaaacaagctgttcgcaaatcctgtacagccgacaaagctttattatgtcgggccgatgttccgttatgaacgtcctcagacgggccgttaccgccagttttatcagtttggaattgaagcgattggttcgaaagaccctgcaatcgacgctgaagtaatggcgcttgcgatgagtatttatgaaaaagcaggtttagaaaacgttaagcttgtcataaacagtctcggcgatcaagatagccgcaaaagctacagagaagcgcttgtgaaacacttcgagcctcgcatcgaagaattttgttcagactgccagtcccggctgcacacgaacccgcttagaattttggactgcaaaaaagaccgagatcatgagctgatgaaatcggcaccttcgattttgacatatttaaatgaagaatcagccgcttattttgacaaagtgaaacaatacttaaatgatcttggcatttcgtatgaaatcgatccgaaccttgtgagagggctggattattacaaccacaccgcatttgaaattatgagcaatgcggaaggctttggcgcgattacgacacttgccggcggcggacgctacgacgggcttgtcgaacagatcggcggacctgaagcaccgggcatcggatttgcgatgagcatcgaacgcttgcttgccgcaattgatgctgaaaaaagagagctgcctgttgataagggaatcgactgctatatcgtcacactcggcgaaaaagcaaaggattattctgtttcattggtgtacaaactgagagaagcaggcatttccagtgaaatcgattatgaaaataagaaaatgaaaggccagtttaaaacagctgatcgcttaaatgccagatttattgcgattttgggtgaagatgagcttgcccaaaacaaaatcaatgtaaaggatgcacagacgggcgaacagattgaagtggcacttgatgaatttatacatgtgatgaaggcaaaccaaaagggataaggagtgaaacgcattgtttggaagaacatattattgcggtgatataactgaaaaagcaattggcgaatctgtaacgctgaaaggctgggtccaaaaaagacgagacctcggcggattgatttttattgacttgcgtgaccgtacgggcattgttcaagttgtttttaaccctgatgtgtcaaaagaagcgcttgctgttgcggaaggcatcagaaatgaatacgtgcttgatattcaaggaaaagtggtggcgcgtgaagagggaacagttaatccgaatttgaaaacaggcgcgatcgaaatacatgctgatggagtgaacgtattaaatgctgcaaagacacctccatttgcgatttctgatcaagctgaagaagtgtcagaggacgttcgtttaaaacaccgttacttagatttgcgcagaccggctatgttccagacgatgcagctgcgccataacgtgacgaaagctgttcgcagctttttagatgaaaatgggtttcttgatattgaaacgccgattttaacaggaagcacgcctgaaggcgcacgtgactacttggtgccgagccgtgtgcacgaaggtgagttctacgcgctgccgcagtctccgcagctatttaaacagcttctgatggtatcaggcattgaacgatattatcaaattgcccgctgtttccgcgatgaagacttgcgtgcggaccgtcagcctgagtttacgcaaattgatattgaaatgtcctttatgagccaggaagacattatgtcattggctgaggagatgatggcaaaggttatgcgtgaaacaaaaggtgaggaacttaagcttcctcttcctcgaatgacgtatgacgaagcaatgaacaagtacggttctgataaaccggatacgcgttttgacatgcttttgacggatgtgtctgacattgtaaaggatacggaatttaaagtgttctcatcggctgtagcaaacggcggcgtggttaaagccatcaacgtaaaaggcggtgccggcgattactccagaaaagacatcgacgctcttggcgcttttgctgcaaactacggggcaaaagggcttgcctgggtgaaggttgaggcagacggagtgaaaggaccgatcgctaaattctttgatgaagaaaagcagtctaagctgattgaagcacttgatgctgctgaaggtgatttgctgctgttcggagcggatcaattcgaagttgtggccgcatcactcggcgccctgcgcttaaagcttgggaaagagcgcgggctgattgacgaaaaattgttcaatttcttatgggtcatcgactggccgctattagagcatgatccggaagaaggccgtttttacgcagcgcaccatccgttcacaatgcctgtccgcgaagaccttgagctgattgaaacagcgcctgaagacatgaaagcacaagcttatgacctcgtcttaaacggctatgagcttggcggcggttcaatccgtatttttgaaaaggatattcaggaaaaaatgttcgcgcttctcggcttctcaccagaagaagcggctgaacagttcggattcctgctggaagcatttgaatacggcgctcctccgcacggcggaatcgcactcggcttagaccgtctcgttatgcttctcgctggacgtacgaacctgagagatacgattgcattcccgaaaacggcaagtgcaagctgcctgatgacagaagcgccaggtgaagtaagcgacgcccagcttgacgagcttcatctttctatcaagaaaaaagttaagaactgattgggcagttcgattcttgaaaatcaaaatcgtctgtgatatgattttgacaagttaaataaagtcctgatgtgttagttgtacacctagttttgaccgaacatttttttgatttgggagcccgcatttttaaatggcgtacatgcctcttttcattcggtaaagaggacttacaagatttaaaagagggcacccacctgctgagagcgggttcaaaacaaaggaaagctgcaacggcactattgggactttattttttgtgcgcagaaaaaacggctgctcatggatcagccattttatagatgaaaccagaatacgaatgtggagtgaggttcttgttacaccagttttcacgcaatgaattagctatcggaaaagaaggccttgaaacgctgaaaaacagcacagttgctgtgcttggagtcgggggggtcgggtcgttcgcggcggaagctctcgcgcggtcaggcgtcggccgcattctgcttgtcgacaaagatgatgtcgacattacaaatgtaaatcgtcagcttcacgcgctgctttcaactgtcggacagccgaaagttgatttaatgaaggcgcggatcgcagacattaacccggagtgtgaagtgatcgcgttaaaaatgttctatacggaggaaacgtatgagcagttttttgactatgatcttgactatgtcattgatgcgtcagacaccatttgttataaaattcatttaatgaaagaatgtctaaaacgggatattccgctcatctccagcatgggtgctgcaaataaaacggatccgacacgcttccaaatcgctgatatctcaaaaacgcacactgatccaattgcgaaggtcgttcgtacgaaattacgcaaggagggtatcaaaaaaggcgttcaagtgattttctctgatgaaagcccgattgttattcgggaagatgtcagaaaagaagtggggaatgacgaagcgaaaatacgtaaagcaaaaatgccgccttcctctaatgcttttgtgccgtcagttgcaggtttgattatgggcggacatgttgtcatggatcttttgaaagacattgaaatcaaacgtgtgaaggataaataatgcataaaaacagccttgatgatcaaggctgtttttttgttttattttcttttcttttcattaatttatcgtacacctgctttaaggcagattcgaactttccagtctgtttcggcttatagtattgcttatttttcagaggatcagggaggtattgttgttcgacccaaccgttgtcgtaattgtgcgggtatttatagtcgattcctcttcctaattcctgagctcctttataatgcgcgtcttttaaatgcttcgggacatccccaatttttccggctctgatatctgccagggcctcatcgattgccagaatggcagagtttgatttcggtgagaggcaaagctcaataactgcgttggccagcgggattcgcgcttcaggaaacccgactcgctcagcggtctgaatagcgttcagcactctagggccggcttgcgggcttgctaaaccgatatcctcataggcgataacaagcaatcgtcttgcgatgctctccagatcaccggcttcaattaatctagccaaatagtgaagagcagcgttggcatcagagccgcggattgatttttgaaaagcggacagtacatcataatgcgcgtcaccatctttatcgtgagaaaagctttttttctgcaagcattcttccgcggtttctaatgtaatgtgaatttcaccgtctgctgactccttcgttgacaacacggcaagctcaagcgcatttaaagcggagcggacatctcctccgcatccgtgggcaaaatgctccatcgcctgatcatcaatggatacagaataggtgccaaggccccgatgctcatcatggagcgcacgttccagtgcctgtttaatcagttcaggtgttaacggttcaagctcaaaaatctgggtccggcttctgatcgccggattaatggcatgatacgggttagccgtcgttgctccgatcaaaatgatcattccgttttctaaatagggtaatagaaaatcctgttttcctttatccagcctgtggacttcatccagaatcaaaatcacttggccggacatcttggcttcctgagctacgatttccatatcttttttattgttaatgacagcattcagctttcgaaaagcaatacttgttgaaccggcgattgctgttgcgattgatgtttttccaattccgggcggcccgtacaaaatcatggatgacaaatgttttgcctggaccattctgccaataattttatcttcagccaccagatgctgctggccgataatatcctctatttttgtcggacgcatccgatatgccaatggcttcatctatcatctctccttacttaattacagggtaacggaaaaccgtacattagaaaagggtaaaggcccctttccttctgcctcaatgaaaattcgctgaaggtatgttataataacagttggtctataagataataaacggacgaaacatatagaaattaccattataaatgtggaaaatcatgaaataacagaggtgttcatgttgaaaatatcaactaagggaagatacgggctcaccattatgatcgagcttgcaaaaaagcacggtgaaggcccgacttcattaaaaagcatcgcacagacgaataatttgtccgagcattatttggagcagctggtatcgccgctcagaaatgccggtttagtgaaaagcatcagaggcgcatatggcggatatgtattaggcagtgagccggatgccattactgcgggagatattatccgtgtgcttgaggggccgatcagccctgttgaagtgctggaagatgaggagcctgccaagcgtgagctctggattcgcatccgggatgctgtaaaagaggttttagacagtacaacattagaggatcttgccagctatacagacggagagcaagaagcttatatgttctatatttagatcagaggtgtaaacataatggaacggatttatttagatcatgccgcaacgtctccgatggatgagcgcgtgctggaaaaaatgataccgcacttctccggcagtttcggtaatccctccagtattcattcatttggcagagaatctcgaaaatgggtggatgaagcaagagcgcagatcgcagcagaaatcggagcggcagagcaggagatcatttttacaagcgggggaacggaagctgataacttggcgatcatgggaaccgcacttgcaagaaaagatcttggcagacatatcatcacaacaaaaattgagcatcacgccgtgcttcacacatgtgaaaaacttgagggagacggatttgacataacgtatctggacgttgaccaaaatggaagagtcagtgcaaaacaggtgaaagaagcactgcgtgatgatacaatccttgtgacagtgatgtatggaaataatgaagtcggaacagtgcagccgatcgaagaaatcggtgagctgttaaaggaacacaaagcttattttcataccgatgctgttcaggcattcgggttgctgccaattgatgtgaaaaacagccatattgaccttctgtctgtttccgggcacaagctcaacgggccaaaagggacaggctttttatatgctagtaaagatgtgaagctttcaccccttttattcggaggagagcaagaaagaaaacgccgtgccggaacggaaaatgttccaggcattgtcgggctgaaagaagcgatcaagctgtcaagtgaagaacgtgacgaaaaaaacgagaagtatcaatcgtttaaagcaatctttgccgacacgcttagagatgcaggtgtggcattcgaggtcaacggggacaaagagcatagtctgccgcatgttctgaatctttatttccccggtgtgtcagtggaagcgctgctggttaatcttgatatggctggtgtcgctgtctccagcggttcagcgtgcacggccggttcagtcctgccgtcacatgttctgactgctatgttcggcgaagagagtgaccggctgacgtcctctattcgaatcagcttcggcctcggcaatacggctgagcaagtgaaaactgctgccaaacatgtggccgacgttgtcaaacggctgacataataaggcggcgtagtaattggagtgaatgaaatggaaaaacggccggaggatacaagagtcgtcgtcggcatgtccggcggagtagactcatctgtggcggccctgctgttaaaagaacagggctatgatgtaatcggaatctttatgaaaaactgggatgatacggacgaaaacggtttttgcacggcgacagaggattatgaagatgtgatccgcgtctgcaaccaaatcggaattccgtattatgccgtaaactttgaaaagcaatattatgagaaggtatttcaatacttccttgatgaatataaagcaggcagaacaccaaacccggatgtattgtgcaacaaagaaattaaattcaaagcctttttggagcatgcattgtcacttggcgccgactatttagcgactggccactatgcaagagtagacagaagcggcggaaaagtcagaatgctgcgcggcattgatgaaaacaaggatcaaacgtacttcctgaatcagctgacagaagatacgctgagcaaagtcatgttcccgatcggcgaacttcaaaaaagccgtgtgcgtgaaatcgccaaagaagcagaacttgcaacggcgacgaaaaaagacagtacaggcatctgctttatcggcgaacgcaacttcaaaacgtttctcagccaatatctccctgcacagccgggcgatatgatgacgatggacggcgaagtaaaaggccgccacgacgggttgatgtactatacgatcggacagcgtcacggccttggcatcggcggaagcggcgagccgtggtttgcggtaggcaaagatcttgaaaagaacatcctctacgtggatcaagggttccataacccgcttttatattccgacaaaatcacagcaacaaatatcagctgggtacgttcggatatcataaagggcgaagagatttcctgcacggctaaattccgttaccgccaagaagatcataaagtaacggtgcgcatgactggcgagggtgaagcggaagtcatctttgatgaacaagtccgcgctgtaacgccaggacaagccgttgtcttctatgacggcgaagaatgccttggcggcgggacaattgatgatgtgtacaaagacggaacaaaattgtggtacgtataaaagatgaaaaacctcaacactgagttggggttttttaatgaaaggaagatgatcggtggattataatcaactcggtatagaggcgatgcaggaaggcgattacgagaaagcggcagaggcatttacaaaagcgattgaagaaaataaagaagacgcgattccgtatatcaattttgccaaccttctttcatccgtaaacgagctggaacgtgcgcttgcgttttatgataaagcgcttgaattagacagtagcgcagccactgcttattatggagcaggaaatgtctatgttgtaaaagaaatgtacaaagaagcgaaagacatgtttgaaaaagcgctacgtgcggggatggaaaacggcgacctgttttacatgctcggaacggtacttgtcaagctcgaacagcctaagcttgcactgccatatttacaaagagcggtcgaactgaatgaaaacgatacggaagcacgttttcaattcgggatgtgcttagccaacgagggcatgctggacgaagcgctcagccaattcgcagctgtaacagagcaagacccggggcatgcagatgcattttataatgccggtgtcgcttatgcttataaagaaaaccgagaaaaagcgctggaaatgctggacaaggcaattgatatccagccagatcatatgcttgcgcttcatgctaaaaaactgattgatccatcataacaggcacaggaggagggacagctcgtgcagcagcatccggatcagcttaaactggaggaagagccctatttaaaagggacagtcaacacagtcatctatcataatgacaccaatttatatacggttctgaaagtgaaagtcacagagacctccgaagccattgaagataaagccgtatccgtgacgggctacttccctgcgcttcaagaagaagagacctacacgttttacggaaagatcgtaacccatccaaaattcgggctccaatttcaggcggagcatttcaaaaaggagattccaacgactaaggaaggcatcattcaatatttatcgagtgatttattcgaggggatcggcaaaaaaacagctgaagaaattgtgaaaaagctgggcgacagcgcccttaataaaatattggctgatgcttcagtgctttatgatgttcccagactctcaaaaaagaaagcagacacgctggctggcgcattgcagcggcatcagggactggagcaaatcatgatttccttgaatcagtttggctttggcccgcagctgtctatgaaaatctatcaagcctatgaatccgagacgcttgaaaagattcaggaaaatccttatcagcttgtgaaggatgtagaaggcatcgggtttggaaaagcggatgagctgggcagcagaatgggtctttcgggtaatcatcctgagcgggtaaaagctgctattttgtacacgcttgaaacgacttgtctgtcagaggggcacacgtacatagaaacggaacagctgatcatcgacactcaatcactgttaaaccagtcagcaagggaagggcagcgcattacagaaatggatgccgctaacgcaattattgcccttggagaaaataaagacattgtcatagaagatggccgctgttattttccttcgctgttttacgcagaacaaaacgttgcaaagcgtgtgaaacatatcgctagccaaaccgaatatgagaaccagtttcccgaatcagagtttttgctcgcgttgggagaactggaagaacggatggacgttcagtatgcccccagccagaaggaagcgattcaaaaagccctttcctcgccgatgcttcttttaacaggcggcccgggaacaggaaaaacgacggtaatcagagggattgtcgagctctacggagagcttcacggtgtgtcactagacccgtcagcttataaaaaggatgaagcttttccgattgttttggccgctccgacagggagagcagcaaaacggatgagtgaatcaacgggactccctgcagttacgatacacaggctgcttggctggaacggcgctgaaggctttactcatacagaggatcagccgatcgaagggaagctgttaattatcgatgaagccagtatgcttgatatatggctggcgaatcatttgttcaaggcgatccctgatcatatacaaatcatcattgtcggagacgaagaccagctgccttccgtcggtccgggacaagtgctcagagacctgctgacatcccaggtgattccgactgtgagactgacagacatctatcgccaggcagaagggtcatcaatcgtcgagcttgcccaccagatgaaaaatggattgctgccgaacaatttgactgccccgacaaaggaccgttcctttattcgctgcggcgggtcgcaaatcaaagaagtagttgagaaggttgtcgccaatgcattgaaaaaaggctatacagcaaaggacattcaggtcctcgctccgatgtacagaggaaaagccggcattaatgaattgaatgtgatgctgcaggacattttaaatcctcctaaagaaaaacggagagaattgaagttcggggatgttgtctacagaaccggagataaaattttgcagcttgtcaatcagccggaaaacaatgtgttcaacggagatattggcgaaatcacgtcgatattttatgcaaaggaaaatacagaaaaagaagacatggccgtcgtttcttttgatggcaatgaaatgacgtttacgaaaaaagattttaatcaatttacccatgcgtattgctgttctattcataaatcgcagggaagtgaatttccgattgtggttttgcctgttgtgaaaggctattatagaatgctcagaagaaaccttctttataccgcgattacaagagcgaagaaatttctcattttatgcggtgaggaggaggcgctggagtggggcgtaaaaaataatgatgcaactgtcagacagacctccttgaaaaacaggctgtccgtacaggttgaggaaatggatgccgagcttgaggctctccaaaaagagctcccgttcagcgtacacgacgccaacattggcatggaaggcattacaccattcgattttatgaaagaagaacagcaataaaatgctcccgtgtaagcgggagttttttcatttgcagtggaattgatttcatcgtatgagtctaaggcgcaaagcaaaacctaagcctgttcaacaaaaggtggttgatcacactttgagaacatgccatgaagtagaaggattcccagtatactcagaacgaacttcttgttatctcggggcaatttccgatatttgtttttctctgaaaggagattgtcttgggtttattcttgcacaaaaacgctttttgcatcatcatcatgcgctattacgggcgtgtgatatctcttccattcttgatgaccgcatattggcttcggtcagttcagaacagcttctgcctcttccgaaaacatgcttcacatacgagcagatgaagatgaagcttgtgaaatcgcaagagggggatatattggggatgctggaagatgtatacttttgtttggacaggggcataatcgtagcatatgaactctcggacggtttcttttctgacctggcgggaagcaagcgccagatccaaagagcggattcgcttgtcgaggtgcggaaagacgagatcgttctgaacggatagaggtgtgaggtatgcttatatgcccgaattgcaaaagtaaggatatcggcaaaatcggcgtgaaccaatattattgctggggctgttttattgaactgacagtggcgaaagggcagattgcaactcatcaggtggaagaagacggaacgttaagcagcttggatgatttgttttctgaggatgaacgcagcatcaatttttaatcatgaaaggagatgcgcaggatgaatcggacaatgacttctcttttggcaatgggagccggagctctcgtgtaccgaatggcgactcaatctcacatgctgaataatcgaagcatgaagcggatgagaagaagaattacgaaaatgttttaatgcaaaaaggatactctccaaagagtatccttttctatgtttgccggacctcgaggcgtcttgctgcgagtgaaaggctgtagttgactgcgaaatacataagggccgcaagtaaaaagatcgggaaaaaataactgccgtctgcgctttggccgtttataatttgcgcgttgtgaatcagttcaggcagggcgatcacaacagcgagcgatgtatcttttaataaagaaataaactggcttacgatgggcggaaccatgcggcgaagcgcttgcggcatgacgataaagaacagggtctgtgtatagctcagcccggaggagcgcgccgcttcaatttgtcctttgtcaattgatttcagtccgcttcggataatttcagatagcatagcggattcaaaaatcgttagtgctgtaattgcagcagctgtaatttcaagcttaatcccaatttccggaagggcaaaaaacgtaaagaaaataattaacagcaaggggaggtttctgatcgtttcaacgagaaccgcaatcaattgagaaagaacgggaactttcgcataacgcagggttcctgcgattaaaccgaagaaaaagctcagaatgatggagatgaaagcaacgtacaaggtgacgagaaagccatcccataaaaacgctaaatgctcctgtgaataagcaccgatgaaatccaatgtaactcactccttatcaatagcttttttccagtcgtttttccagatagttaacaccgatgctaagcggaatcgtcagcactaagtaaaaaagcgccacgaaaatataaacatcaaatacaacgagtgtgctcgacgagactaaatcagcctggtacataagatccaatccggccacaaccccaagaatcgaagagtttttgactaagtttaaaaattgattgcctaaaggcggcatgacgattttgattgcctgcggcaaaatgatatggagcatggcttggctgtaggtaaagcctgacgagcgtgccgcttccatctgcccttttgaaacagactggattcctgctctgatggcttcagcgataaacgcagaggtataaatggtgagagcaaccgttcccgcttgaaaaccgtcaagcctcaggcctgcgtttggaagtccgaaatagaaaacaaaggtaattaaaagaagagggatgttgcggatgaattctacatatacggtcccgagccattgcagcggcttaaagactgttattctcataaccgctacagtaacgccgaggacaaaactgccggccagcgcgataacacttgcaagcaaggtatggtaaaaaccgtccatatacatgccgaagttatcgaaaagaattgacacattcatctgcctattcactccttaacaaattgggatgagcatcgcctgctcatcccgggatggttgttattcagctgggtcttctttgatccattttttataaatttcatcgtatctgccatccgacttcatctttttaagtgaagcgttgatttctttcgcgagagcagattgcccttttttcacggcgatcccgtaaggctcatctgtaaaaggctttcctgttaattgataatttttattttcatcagccattccatataaaatcgcattatctgtggtgagggcatcgccttgccccgatttaagggctgtaaaggcttctgcgtagttttcaaattctaaaacagatgcttcaggcgccttttcacgaatgttttgagaggaggtggagccttttactgcaagaacttttgagcctttgtcaagatcctcgacactcttgattttgctgccttttttcacgagaagcgattgcccggcctcgaaatagacatcagaaaagtcaacttccttttttcgttcatcagtgatcgtcattgtggcgacaatggcgtcgatatccccgttttgcagcataggaatccttgtttttgaggtgacctctttaaattcagcttttttctcatcaactaaaatgtctttagcgatttgtttggcaatatcaatatcaaaaccctcaatctcacctgagcttggatttttaagaccgaacagtcgagtgtccgtttttacgccgaagacaattttgtcattgtctttaatggcggctagcgtatcttttttgctctcctttgaggcttctccgtttgatcccttgctgctgcaagcggcaagcaagatgacagcgaataaagaaatcaatgctaaagaaaaaatctttttcatacaagctcccccattctgttttaatgatttaaaatacggcttaagaataagcgggcccgttcttcctttgggttcgcgtaaaactcagccggcattgcttcttctaaaatctttccttcgtcaatgaagacaatccggtcggcaacttctttggcaaaccccatttcgtgtgtcacgacaaccattgtcatgccttctttggcgagtgttttcatgacatctagcacctcaccgatcatttcaggatcaagtgctgatgtcggctcgtcaaacagcatgacctccggcttcatcgccagtcctcttgcgatggcaacacgctgctgctgcccgccggaaagctgggaaggataggcgtcagccttgtctgggatgccgactttttcaagatagtaccgcgccgtttcctttgcttgttcaggtgattgtctaagcacttttaccggagccagcatgatgttctgcagcactgttttatgtggatataaatgaaagtgctgaaacaccatcccgatattttgccgcactttattgatatcagtttttctgtcgttaatggcggtgccgtttactgtgagcactccctcattgatcgtctcaagtctgttgatgcatctgagcaatgtgcttttaccggaaccggatgggccgatgataacaacgacttcacctttttcgatttgaagattaatttgttttaacacgtgaaaatctccgtaatgcttgtttacattttgaaatgtgatcatcgcaatcctcctatcagaaaatttgaccaaaaagtaaatgatcaaacttttctgaaaattaaatgtgaaaaaatgtccatgacttctgactgactaaagaaacataaagaataattccgtgtaaacctcaaaagatataggtgaggtgaaagcagatgctccaaaaaccggtgcagcttttgttgtgggtggctatttgtttgctggttctgttaacagtctatgtcttttttatgcttgatatgttatggtcacccttttggctcgtcataaaaacgatctttattcccttgatcatttctatttttatatcttatttattgcttccggtcacggaatggctgcatggcaaaggattgcctaggactttgagcatcttggtcatttatgttcttttttttggcgggattggctgggcgttgtataaaggggtgcctgttttaatcgtgcagctgacggatttgtcagaaaatatacccatgtttgccgaaacgtataacgggcttcttcttcatgtgcataaccatacggatgactggcctgatggtatgcatcaccgtatagataaaatgatccgccagacggagacgttttttgcgggaacgatcgagggtgcgatcagcgggatccgcaatgtgcttgattacttcttaattgctgcaacaatcccttttctcgtgttttatatggtgaaggacattgaattaatgaaaaagacagtatggtacttgactccgaagtcgtggagaaagcggggcagcgcctttttgcgggatgtggatgattcgcttggcgattatatccgcggccagcttttggtctgcttgattcttggcgtgattgcaggcatttcgttctgggtatttgggcttccgtatccactgatacttggccttatctctggagtaacgaatgtcatcccgtattttggccctttcatcggagctgttcctgcgttgttaattgcgatgacgatctcagtgaaggcggttcttgttgtggtgattacggtgtttattctgcagtttatggaaggaaatatcctcagtccgttcattgtcggcagaagccttaaaatgcatccggtcgttatcatgcttgcactccttgccggaggggagcttgcgggaatcgtcgggatgattctggctgttcctgcgacggctgttttaaaagtaatgatgatccattttttgcggatgaggacggagcattgacatcggcgtgccgcttgtctataatttctcgtagaatacatacgaatctcgagtgacggatctgagtacgccgaagccctgttaaagagagaagctccataagctgaaaggagctttatcagaagatcggaggaagctaatcctgagtgcagttaatcactgccgcttatcctgcgttacagggttaaaggtgacgggcgaataatgcccgtaatcagggtggtaccgcgagacagctctcgtccctgtgtaaacgttggtttgcataggggggagggcttttttgctgtcactgaagagaatttcgatttttatagaggaggaaatacaatgaaacacttaacttctgcggaagtgcgtcaaatgtttttggatttctttaaagaaaaaggacatgcggtagagccaagcgcgtcattagtgcctcatgaggatccttcactgctttggatcaacagcggtgttgcgacgctgaaaaaatattttgacggccgtgtcgtgccggaaaatccaagaatcgtaaacgctcaaaaagcgatcagaacaaacgatatagaaaatgtaggtaaaactgcgcggcatcacactttctttgaaatgctcggaaacttttccatcggcgattatttcaaagaagaagccattacatgggcttgggagtttttaacgagcgacaagtggattggcttcgacaaagagcttctctctgttacggttcatcctgaagatgaagaggcatatgagttttgggcgaaaaaaatcggtattcctgaagaaagaattatccgtctggaagggaacttctgggatatcggtgaagggccgagcggaccgaatacggaaatcttttacgaccgcggtgaagcatacggtaatgatccagaagatccggagctttacccaggcggggaaaacgaccgttacctggaagtatggaaccttgtgttctcagagttcaaccataaccctgacggaacgtacacaccgcttccaaagaaaaacattgatacaggcatgggtcttgaaagaatggtatctgtcatccagaatgttccgacaaactttgacaccgatttgtttgttccgattattaaagcaacagaatcgatttctggtgaaacatatggcaaagacaatgtgaaagacactgcgtttaaagtgattgctgaccatatcagaacggttgcctttgctgtcagtgacggtgcgctgccgtcaaatgaaggccgcggctatgtattaagacgcttattacgccgtgccgtgcgttatgccaaaacgatcaacatccatcgtccgttcatgtttgatttagtgccggttgtcgcagaaatcatggctgatttctatcctgaagtgaaagagaaagcggatttcatcgcaaaagtcattaaaaccgaggaagaacgcttccatgagacccttaatgaagggcttgcgatcctgtcagaaatgatcaaaaaagaaaaagacaagggcagcagcgttatctcaggtgctgatgtgtttaaactgtatgatacgtatggattcccggttgaattgactgaagaatacgcagaagacgagaacatgacggttgaccatgagggctttgaggaggaaatgaaccagcagcgtgaacgggcaagaaacgcccgccaggatgtcggcagcatgcaggtgcagggcggcgcactgcgcgacgtgacagatgaaagcacatttgtcggctactctcaaaccaaagctgatgccaatatcattgtgcttcttcaggacggccaattaatcgaagaggctcatgaaggagaaagcgttcaaatcattcttgatgaaacaccgttctatgcagaaagcggcggccaaatcggcgataaaggctatctccgaaacgagcaggccgttgtaagaattaaagatgttcaaaaagcgccgaacggccagcatgtgcatgaaggtgttgtggagagcggtactgttcaaaaaggcctgcatgttacggctgaagttgaagaccatatgagaagcggcgtcattaaaaaccacacggcaacgcatttattgcatcaggctctaaaagatgttcttggaactcatgtcaatcaggcgggctctcttgtaacggaaaaccgtcttcgttttgacttctcgcactttggccaagtgacaaaagaagagctcgaacaaattgaaagaatcgtaaacgaaaagatctgggcgagcatcccggtcagcattgatttgaaaccgatcgctgaagcaaaagaaatgggtgcgatggcactgttcggcgagaaatatggcgatattgtccgtgtcgttcaagttggagattacagcttagagctgtgcggcggctgccatgtcagaaatacagcagaaatcggcttgtttaaaatcgtttctgaatccggaatcggagcaggcacaagacggattgaagctgtaacgggacaaggcgcttacgtcgaaatgaacagccagatttctgtattgaagcagaccgctgacgagctgaaaacaaatatcaaagaagtgccgaaacgggttgcggctctgcaggctgaactgaaggatgcacaaagagaaaatgaatctcttcttgcaaaactaggcaacgtggaagcaggagcaatcctgtcgaaagtaaaagaagttgacggcgtaaacgtgcttgcggcaaaagtaaatgcaaaagacatgaatcatctccgcactatggtcgatgaactcaaagcaaagcttggctctgcggtgatcgtgcttggtgcggtacaaaacgataaagttaatatctctgccggagtcacaaaggacctcattgagaaaggccttcacgccggcaagctggttaaacaagctgcggaagtttgcggcggaggcggcggaggccgtccggacatggcgcaggcaggcggtaaacagccggaaaaattagaacaagctttagcttctgtagaagattgggtgaaatccgttttataattcgcccatgtagtgtagaatgatggtaagattaggaccccaggctgaactttgcctgcgaatttgggaaagaggtgcaaaacggtgagctcgtttgataaaacgatgaaatttaatttctccgatgattctgctgagactaacgtaaatgaggtgctgattacagtgtatgacgcgcttcaggaaaagggctacaatccaatcaaccagattgtcggatacttgctgtcaggtgatcccgcttatattcctaggcatcgtgacgctcgcaatttaattcgcaaacttgaaagagacgaattaatcgaggaattggtaaagtcttatttagaacagcataaagaggcgtaaataaagaatgagaatattaggactcgatttaggaaccaaaacactcggtgtagctctgagcgatgaaatgggctggactgctcaaggcattgagaccataaagataaatgaagcagaaggcgattatggtttatcccgtttatctgaactgataaaggactatactatagataaaatcgtgctcggctttcctaagaacatgaacggaacagtcggcccgagaggcgaagccagccaaacatttgcgaaagtgcttgaaacaacgtacaatgttcctgttgtgctgtgggacgagcgtcttaccacaatggcggctgaaaaaatgctgattgcagctgacgtcagcaggcaaaaacgaaaaaaagtcattgataaaatggcggctgttatgattttacaaggatatcttgacagcttaaattaaagccagaggtgaagaaaatggaacacggcgaaaaaaatattacaattgttgacgatcaaggaaatgaacagctttgtgaagtgctgtttacatttgaaaacgaagagtttggcaagtcttatgtcttgtactatccaatcgaatcaaaagatgacgaagaagtagaaattcttgcttccagcttcacgccaaacgaagacggtgaaaacggtgagctattcccgattgaaactgacgaagaatgggatatgatcgaagaaacattaaacacattcttagcggacgaagacgaagagtaaaacatcgcgccaaaccaaagccggagctatactgctccggcttttttctgctttatgcaggcctctttttgtaataaattgccgaaatacaatgaatcatgtagtataagagctgatgggaggagacctaatgtatatcaatcagcaaaaaaaatcgttttttaataaaaaaagaatcatactgtcttccattgttgtgctgtttctcatcattggcggggcatttttatatgggaaatcattgcttgaacctgttgaaaaagacagtaaaacgacagttaatattaacattccgagcggttcgtctgtttcagccatcgcatcgatattaaagaaaaatgatgtcataaaaagcgagaaggcgtttcagtactatgtgaaatataaaggtgcttccgggtttcaggccggattctaccatctgaataaaagtatggatttagatgccattattcagaagctgacaagcggggctacaggttacgcttttcaaatcacagtgactgagggagcacagctgacccaaatcgcggctgctattgctgatgaaacaaaatactctaaaaaacaagtcatagcgaagctggacgatgaaacatttatcaatcagctgaagaaagaattcccggacactgtgacaaatgatgttttcaataaaaacattaagcacccgcttgaagggtacctattcccggctacatacccttttaacgatccggacacatcacttgaagacattatcaaggcaatgattaagcagacaaattcttatgtggaaacatataaatcagaaatgaagaaaaacaaagtttctgtgcataagctgctgacaatggcttctttgatagaagaagaagcgactgaaaaagccgaccgccataaaattgcgagcgtcttttataaccgcctgaaaaagaaaatgccgctccaaacagatccgaccgtcctgtacgcggcaggcaagcataaagatcgggttctttataaggatctggaaatcgattcaccatacaatacgtataaaaacacagggctgacgccagggccgattgccaatgccggcatgtcgtcatgggaagcggcgctgcatccggataaaacggactatctgtatttcttggccaaatcaaatggtgaggtcgtatttacaaaaacgctaaaagagcataataaagcaaaagaaaaatacatttcctcaaaaaatgagaaataaaaggagagcaaaaagctctccttttgttcgctttccgcaaggttttatgataaaatatatcgggttgtttaccgatgtatcatgatgtattcagagagtgtcctgcgcataagactggggcactcctttttagaacgggaggctgtttgtagtgactgaccggtatgaacaaataaatgactatatagaagcattattaaagcctcggccggataacgtgaagaagcttgaagcatatgcagaagaacatcatgtcccgattatggaaaaagcgggcatggaggtgctgcttcaaattttgtctgtgaaacagccgaaaaaaatactagaaatcggaacggccattggttattcagccattcggatggcgctggagctgccgtctgctgaaatatatacaattgaacgcaatgagaaacggcatgaagaagcggtaaacaatatcaaggaatttcagcttgatgaccggattcatgttttttacggagatgcgcttgaattagccgacgccgttcatgtaaccgcgccttacgatgtcatttttattgacgctgcaaaaggtcagtatcaaaacttttttcatttatatgaaccgatgctttcaccggacggggtgattataacagacaacgtgctgtttaaaggtctggtggcagaggattacagcaaaatagaaccgaagagaaggcgcaggcttgtagcaaaaattgatgaatataatcattggctgatgaatcatccggattatcaaactgcgattattcctgtcggggacggacttgcgattagtaaaaagaagaggtgaacgtcatgaaaaaaccagagctcttagtgacgccgacgagcacagcggacattttgccgctcatacaggcgggggcaactgcgtttttagttggggaacagagatacggcttgagattagccggagaattttctcgtgaagatgtaacaaaagccgtagagattgctcacaaagaaggagcaaaagtatacgttgctgtaaatgcaattttccataacgataaagtgggtgagcttggcgaatatctggctttcttagcagaagccggtgtcgatgcagcggtattcggcgatcctgccgtgctgatggctgcccgtgaatctgcgcctgctctgaagcttcattggagcacagaaacgacaggcaccaactattatacatgcaactactggggacgcaagggtgcggcgcgctctgtgcttgccagagaattaaacatggacagcattgttgagattaaagaaaatgcggaagtcgaaattgaaatccaggtgcatggaatgacatgcatgttccaatcgaagcgttctttgattggaaactattttgaatatcagggcaaagtcatggacattgaaagaaagaaaaaagaatcaggcatgtttttacacgataaagaacgtgataataaatatccgattttcgaagatgaaaacggcactcacatcatgagcccgaacgatgtgtgcatcattgatgagctcgaggaattgatagatgccggaattgattctttcaaaatcgatggtgttttgaaaacgcctgaatacctaatagaagtcaccaaaatgtacagagaagcaattgatttgtgcgtggaaaaccgtgacgaatacgaagcgaaaaaagaagactggatcgaacgcattgaaagcatccagccagtaaacagaaaaattgataccggattcttcttcaaggaaacggtttattaatcaaaaggaggttaagctatgactgccgtaaatgataaaatatccacaatcgttaatggaaagcgtgtgattacgaaaaagccggaacttctcgcacctgcgggtaatcttgaaaagctgaaaatcgctgttcattacggagcggacgcggtctttatcgggggacaggaatacgggctgcgctcgaatgccgataactttacgatcgaagaaattgcagaaggcgttgaattcgcaaagaaatatggcgcgaagatctacgtaacaacgaatattttcgcccataatgaaaatatggacgggcttgaagactatttaaaagcgcttggagacgccaacgttgccggtattattgtggcagatccgcttattattgaaacatgccgcagagtggcgccgaatgttgaggttcacttgagcacacagcagtctctttcaaactggaaggctgtccagttctggaaggaagaaggtctcgaccgcgtcgtgctggcacgtgaaactagcgctcttgaaatcagagaaatgaaagaaaaggtagatattgaaatcgaatccttcattcatggcgcaatgtgtattgcatattccggccgctgcgtgctgagcaatcacatgacagcgcgggattccaatcgcggaggctgctgccagtcatgccgctgggattatgatctctaccaaacagacggtgccaacgccgttgctttgtatggtgaagaagatgcaccatttgcgatgagcccgaaagatttgaagctgattgaatccattccgaaaatgattgaaatggggatcgacagcttaaagattgaaggccgcatgaaatccattcactatgtagcaactgttgtcagcgtataccgcaaagtaatcgatgcttattgcgctgatccagagaactttgtgattcaaaaagaatggcttgaagagctcgataagtgcgccaacagggacactgcgacagctttctttgaaggaacgccaggctatgaagagcaaatgttcggcgaacacgccaagaaaacgacatatgattttgtcggcttagtgctgaattatgatgaagatacacaaatggtcacgcttcagcagcgcaatttcttcaaaaaaggcgacgaagtggaatttttcggaccagaaatcgaaaactttacacatacgattgaaaccatttgggacgaagacggaaatgagctagatgctgcccgccatcccctgcaaattgtcaaattcaaactagacaaaaagatttatccgagcaacatgatgagaaaggggaagtaacagcccatgggtaagaatccagtagtcattggaatcgcaggaggttccggttcaggaaaaacgagtgtcacacggtccatttatgaacagtttaaaggacactcaattttaatgatccagcaggacctttattataaagaccaaagccatcttccgtttgaagaaaggctgaacacaaactatgatcatccgcttgcgtttgataatgactatttaatcgagcatattcaggatctattgaattaccgcccgattgaaaagccgatttatgactataagcttcacacacgttcagaagaaacggttcacgtagagccaaaggatgttattatccttgaaggcattcttgttcttgaagacaaaaggcttcgtgatctgatggatatcaagctttatgttgatacggacgctgacttgcgtatcatcagacggattatgagagatattaatgagcgcggacgctctattgattctgtcattgaacaatatgtgtcagtggtccgtccgatgcataaccaattcgtcgagccgacgaaacgatacgctgatattattatcccggaaggcggtcagaatcacgtcgcaattgatctgatggtcacaaaaattcaaaccattcttgaacaaaacgcgattttgtaataccatagcatagacataaataactctgaccatattatgtataggcaggaagggaatgtgcgaattcccttctttccctgtttataaaaatatttgcagaacgatacgattcagtttaagataaacagtacctatatgggagagaagaacgaggactgccctgtgttctcattcttgtattttttagtttatgctctcatacataatcgaagatgttgagggacaaccagaaggagtgaagggacatggcacaagagaaagtatttcctatgactgcagaaggaaaacaaaaacttgaacaagaattagaatatttgaaaacggttaaacgaaaagaagtagtagagcgaatcaaaattgcgagaagcttcggagacctttccgagaactctgaatacgattcagcgaaagaagagcaggcatttgtagagggccgcgtgacgactcttgaaaatatgattcgcaatgcgaaaatcattgaagatgacggcggctctaacgttgtcggtttgggtaaaaccgtcactttcgtcgaactgcctgacggtgatgaagaatcatatacgatcgtcggaagcgcggaagctgacccgtttgaagggaaaatctcaaacgactcaccgatcgcaaaaagcctcttgggcaaaaaagtagatgaagaagtcacagtacaaacaccgggcggagaaatgctcgtgaaaattgtgaaaatttcataatatttgtttagcagcgaaacacctcgtccacaatgtgggtgaggtgtttttttatgaagatatcgaaacgaatgaagctggcagtcatcgcatttttgattgtattttttctgcttctgcttaggcttgcagaaatccagctgtttttcacagaatcattttctaaaaagaaaattaatttgattcaagaaagcgtgaaacagcggacggaggaagtgctcatttcagatggaagaggctcttttttagatcgaaacgggcgggcgctgacaggacaaagcgagcctgcggttgttttgttcccttttctgctgacgcaggattggccgatcaaaaaagttgcggacatcctcggcatgtctgaagatgatttgcgccagacactaggtaaggcaaaaaaaccggtcattttgcagcaaaagaaaatcaaaacactttcaaaacaatctatcacaaaaatcaattctttgaaatatcccggcatttacggcgtatatatggagaatgaagacaagcccagccttgcttcacatacgatagggagcacgaaccaagatccggcgctgcttcgcaagaaatatcctgacaaggagagccttccgattacaacagaaatcggaacaaccggtttagaacggacatttgacgagtttttgcttccggaacaagacacaaagcttttatatcatgtggacggaaaaggaaaccctttgtttggcatggacgtcaaatatacagctgaagccaatacattttatccgctccaggtcaaaacaacgatcgatcaaagcattcaaaaagcgatggaggaggtattggatgaacaggggctgaaaaagggaggagctgtgctgctggacatcgaaaatagcagtgttctgggaattgtaagcaaaccagatgcggatgtgtcccggcaaaacacacttcaaaattatatgctgacgccaatctatcccggatcagtttttaaaacagtcattgccgcagctgcaatcgaaaataatatggtgaagcctagtcaaacctttaattgcaatttaaacctgtacggggaaccgggggacgacaaaggaaccttgtcttttgatgaaagttttgcacaaagctgtaattacacatttacgagtcttgcagaacaattaatgaaaaaagacagctcggttattgaagatatgtccgagaagctggctctcactgatcgggcaggctgggagggaaaactgtaccacgaaaccgatttccgccagctgtataacgaaaaaagcggcgtgatttggggggatgaaaaagacaaatcagtcaaaaaagccattgcgcaaaccgcaattgggcagaaaaatgtaaaggtaaccccgctggaggtagccaatatgatggcgacaatcgcccgcggcggagaaaaacggcaggtgaaaattgccgaacaaattgagtataagaacggcacaacgctcgttacgtttaaagatcagaagctcaaaggggaaacgatagacaaatatacgtcacagcagcttcaaaaaatactgcggcgggtggtagaatctccttccggaacgggcagaaggtttcaagatcttccgtatactgtagcagggaagtcgggcacagcccagacaggcaagctttcaaaagagaaggaaacgctctatgaaaaatggtttgccggatattttccagcggataagccgaaatacgctctggttgttttacacatggatacaccgggagataaggctctgacaaattcggtgttttatgatattgttaaaaaagtacacgaaattgaaatcaatcagaaatagaacaacttctcagcacatgttaaaatatatgctgagccaagagggataaaggagtgcagaattattgagcaataatcaatctcgttatgaaaatcgtgataaacgcagaaaagccaatttagtgcttaacattttaatcgcaatcgtatccatactaattgtcgtagtagcagcgaatctcttcattaacagtccttctagcaaagatgtcagcaaggattctgaaacggcgcaaaaacaggaatctccggcttcaggaaagacggaaaagaaatcggatgaggatataaaagacagcaagaaagatacatctgacagcgaaaaggattctgagaagtcttctgactctgattccaaaaaagatgattcttcttctaaaaaggatgattctgattcagattcaagcacagattcagccggtgatgggcttaaagatgcaaaagtaacagaaggcggctcatcgagcgatgtggaaaaaacgtatgaaaatcctgactggaaagcagtcggaactgagcaaacaggcgagcatgccgctacttatgattcaagctcgcaagactgggctgagatgctgaaagccatttcgtacgcaactggtgtctcaacagataacatgacggtgctctggcttggaaataacggcagccctcaggatgccaaaggcaaaattttggacaaggcgactgggaataagtatcaagtcacgattacatgggtcgatgaaaaaggctggaagccgacaaaagtagaaaagctaaaataaacaaaagcagccgggttacaaccggctgcttttgttttaggcttcagctgcgaaatgaaccaccgcgctgtacaatattcttccttctgccacagcagtttggtgtgaaacagatttcacccggagcatgatggctttattgttttcaatttgtgtattgattttcttttcaagctcctgcaatgaagcggcttcaaaaaattccactttgtctttaatcagatctaattgaaaattcatgtcttgaccctccagctttcacaagtcatatgaagtataagcttttttgcggtcaatgcgcaatatgagatggcataaaatacacaaagtgttttagtacctgcttttcagaagatgtggtattataggaactgttccatcattaattcatagtatgcttataggaattattaaatatggagtgtgacaaatatgggacgtgaatttatccctctctttgaagattgggcagcaacttatgatcaaacagtacaaggtttagatattcagtataaagaagcattcagaggctacgatcatatccttgatgccatcgtcagcaaatctggaacgcatgtgttagaatttggcccggggacagggaatttgacggctaagctgctcgatgcaggcaaaactgtatttggaatcgaaccttctccagcaatgcgtaaactggcttctgacaagctttcaggcaggtcggaaatcgttgatggagacttcctgacattccctgagccgccatttcaggctgatacaattgtcagttcatatgcttttcatcatttgactgacgaagaaaagcgggctgccataaagcaatatggcaaataccttcacttgcatgataaaatagtgtttgccgataccgtctttgaagatgcgcaagcgtatcaaaaggctatcgataaagcccgttctcaaggcttttatcagcttgcaaatgatttagagacagagcattatcctacattggaagcgttgaaagaaatgtttacagctgaaggttttgcagtccgattcactcagcaaaacgacttcgtgtggataatggaggcgatcaaacggtaaagtgaagggaatgtgaatagatgagactagcagtcatcggagcaatggaagaggaagttaccatcttaagaaacaaacttgaaaatgcaaaaacagaaacgatcgcacactgtgaatttacaacaggcgaatatgaaggaactgaagtgattcttttaaaatcaggaattggaaaagtaaatgctgctatcagcacgacgcttctgcttgaccgttacaagcctgattatgtcattaacacaggctcagccggcggatttcatcatacattgaatgtaggggatgtcgttatttccactgacgttcgtcaccacgatgtagacgtaacggcttttgactatgaatacggccaagtgccgggtcttccagctgcttatgcagcggatgaaaagctgattagcatcactgaagaagcggtatctgaactcgacggcattcaggttgcaaaaggaacaattgcaacaggcgattctttcatgaacgatccgaagcgggttgaagaggtgcgtgcgagattttctgatctgtacgcggttgaaatggaggctgcggcagtggctcaagtgtgccatcaatttaaaacgccgtttgtcgtcatcagagcgttatctgatattgcaggaaaagaatcacatgtttcatttgaccaatttttagagcaggcggctgtgcattcaacagagcttgtgttaaaggtgatcaaacgaattcattaaaacggggagaacgttctcctccgtttttctctaaaaacaacctctaattaggaggaggacatatatgacagtgattacggacattaccgagctgattgggaatacaccgcttctccgcttgaagaactttgatgttccagaaggagtcgcggtgtatgccaagcttgaaatgatgaatccagggggaagcatcaaagacagactgggagatatgctgattcgtgacgcgcttgattcaggcaaggtgaaacccggcggagtaattatagaagctacggcaggcaatacagggatcggccttgcgctgagtgccagaaaatatgggctgaaagcgattttctgtgtccctgaacatttcagcagagagaaacagcaaattatgcaagcgcttggcgcatcaatcattcatacaccgcgtcaagacggaatgcagggcgccattcaaaaagccattcagctggagactgaaattgaaaattcttattgcgttttgcaattcaaaaaccaagtaaatccatcgacttactataaggcgcttggacctgaaatgtgggaagcgcttgacgggaatattcatacgtttgtcgcaggggcaggatcagggggcacgttcgcaggaacagcttccttcttaaaagaaaaaaatccagcagtcaaaacggtgattgttgaaccggagggctcgattttaaacggaggagagcctcacgctcataaaacagaaggcatcggcatggagtttatccccgattatatggataagagccattttgacgagatctacaccgtaacagatgagaatgcgtttagacttgtgaaagaagcggcagaaaaagaaggcctgctgatcggaagctcttcaggtgcagcgctttatgcggcattggaggaagcgaaaaaagcatccgctggaactaacattgtcacagtatttcctgacagcagcgatcgatatatcagcaaacaaatatacgaaggaggcatctgatatgaagaaaaaaacattgatgatacatggcggaatcacaggtgatgagaaaacaggcgcagtttccgtgcccatttatcaagtcagcacgtacaagcagccgaaagcaggacagcatacaggctacgagtattcaagaacggccaatccgactcgaaccgctctcgaagcacttgtgacagaactggaaagcggggaagcaggctatgcgttcagctcaggaatggctgccattacagcggttatgatgctgtttaacagcggagatcatgtcgtgttgactgatgatgtgtacggcggaacatatcgcgtgatgacaaaggtgcttaaccgtcttggcattgaatcaacatttgttgatacgagcagcagggaagaagttgaaaaagcgattcgccctaatacaaaagccatttatattgaaacaccgacaaacccgttgctcaaaatcaccgacctgacgctcatggctgatatcgcaaaaaaagcgggtgttctgcttattgtagacaatacctttaacactccttattttcagcagccgcttactttaggcgctgatatcgtacttcacagtgcgacaaaatatcttggcggacacagtgatgtcgtcggaggtttagttgtgacagcttcgaaagagcttggagaagagctgcattttgtgcaaaactccacaggcggcgtgcttggccctcaagattcctggctgttaatgagaggaatcaaaacgttgggactcagaatggaagcgatcgatcaaaatgcacggaaaatcgcaagctttcttgagaatcaccctgctgtccaaacgttatattatcctggttcttcaaatcatcccggacatgagcttgcaaaaacgcaaggatcgggcttcggcggtatgatctcctttgatattggcagtgaagaacgggttgatgcgtttttaggaaatctgaaactgtttaccattgctgaaagcctgggggcggttgaaagcttaatttctgttcctgcaagaatgacacatgcctctattccgagagaacgccggcttgagctcggcattacggacggcttgatcagaatttctgtaggaattgaagatgcggaagacttgttggaagatatcggccaagcgcttgaaaatatataacaaatggatagaattactttctctgtaagccgccggattatattataatagtcgtatactatgaatctggcaggtgattcttttgaacaaaaatagaatgaaatctttaaaagaagactacaagcattttgcttttacattgcttgcagtcagcacttttttatatataggcgcagttctccctgatcaaggcttaacattaggccagaaatcgactatgtttttagcggattgcgtatttttagccggtgccttcttttgcgctgaccgttcacttatttacaagaagcgtttggaagaagccgacgaataaaaaaacagccatcatcaagagatggctgtttttctgttattgttctcgaagttcttttcccatgccttttaaaaactgaaggccgaagccgacggctctgttgatgtcagggtcgttcattgcttttaacaggtcgagaaccccgactttcttgtcttcttttaaaaagctttgtgcctgttcagtcccagccattacgctttctaaaagctttgctgtaaactcaggatcggcttttgtcaatgcgcctccggcggccatcatcgtgttgatgaggttggtgacaggctcgcgggaaacttggccaagcgcaatcttggcaatgtcttccttcgctctgagcatgcttgttgccgcatcaaaaattccaagatcattgagttcattcattaacgtcatcgttttagagacggcatcctcattttccgccagcagctctttcagttcttctattttttcaagcttaatttgctcagctgtttttgtttcttttttgatcgtcgtaatcggagtggccattcgttttcctcctatcgtttaatcagtcagatggacatagccaggacggttccattttctttctgcttcgactccgttttgcggatgccgttttttgttgcgcggatttgtttttggaagcggcgctgtttcacagccgccaagcacttccatgcggacttttgtctgtttataagcaggcgtgttcgtccgtttatcagctgcagggcccgtcaagaagttaatcgctgactccttgtctgtcgagttcattggcagatagagttcatttttccgtacccggtctgtgatcagcgcgttcaatttgactgctccgaacggagaaacgagccgtacaagcgaaccgtcacaaacacctcgctcttgtgcaagctcaggtgagatctcaacgaatacattcggcactttcgcttggatgcctttcgatttatttgtcatgtttccttcgtggaaatgctccagcatccggccgttattgatatgaaggtcatattcctccggaaatgccgctggctcggtccaatcagaaagggcaaagcgggcttttttgtcagggaaattaaatccgtcttcatacagaagcggtgtgctttcacctgtgaagctgccccataggaagctgttccagccttcaagcacctcatagcttgctttggcaaacagaggagaaagactcgccatttcagagaaaatgtcacttggatggctgtaattccaattcgctcctaaacggtttgccacctcttgaataatccaccagtccggttttgcgtcaccaagcgtcggaagcgcctgatacaatcgctggacacggcgttctgtgttggtaaatgttccgtctttttcaagtgaaggagtggccggcaagacgacatcagcatattgagctgttcttgacaggaagatgtcctgtaccacgaagaaatcaaggcttgataaaatatcatgcacatggttcgcgtttgaatcgaccagtgccatatcctcaccgacaagatacatagctttcatttttccttcttcaatggcatgaagcatttgaatattatctaaaccaggctttccatcaatctcgacaccatatgcctcttcaaatttagcgcgggccttgtcatctgtaatatgctgatatcccggcagccagcctggcaatgttcccatatcacatgcgccttgcacgttattgtgtccgcgcagaggataagcgccggcacctggacggcgatagttgcccgtagcgagaagcaggtttgaaatggctgctgatgtatcagaaccgcctgtattttgtgtgacacccattccccaaagaacacaagtgccgtcagcatcacgaatcatttcagcaatttgaatgatgttttcttttgaaaggcctgtgatgcgttctgcataatcaagcgtatacgttttaagggtttctttataatcttcaaagtaattgacgttctcatcaataaacgcctgatcgtgccagccttggtcgatcatatatttcgtaacagccatcagccaaacttggtctgtgccttgtttagggctgatgaacagatcggatcgctcagccatctcatttttacgcaggtcagcaacaatcagtttttgaccgtggagcttgtgtgcccgtttgacgcgtgttgcgagcactgggtgtccttccgccggattggcaccgacaatgatgacgagacctgctttggcaatatctttaatcgtgccggcgtcaccgcccatgccgacagtgcggaataatccgtctgtagcaggagactggcagtagcgtgagcagttatcgacgttgtttgtttcaaatacctgacgcgctagtttttgaatgacgtagttttcttcattcgtaattttagaagaagaaataaacccgacagagcctttaccgtactgctctttaattgatcctaatctgcttgcgacaagatcgagggcctcttcccaagaagattccacaaaggctccgtttttacggattaaaggctttgtgatccgctcttttgaattgacaaaatcccagccgaatttccctttgacacatgtggaaatcgcgttaaccggagcatcagaaacaggctggatctttaaaatatcccgtccttttgtccatacttcaaatgaacacccgacaccgcagaacgtacatacagttttcgtttttttcgttctcgtttcacgcattgccgcttcgacttcagaaatggcaaaaatgctgccataccccggttcaacatttttcacgagatcaatcatcggttccatgacgtcctctttaatgcctgtcataaagccagcctgcccgagcattgatttttccatcagtgcattacatggacatactgttacacactgaccgcagctgacacaggaagattcattgatcggaactccctcatcccaaatgacgcgagggcgttcgcgttcccagtcgattgagagtgtttcatttacctgaaggttttgacagacctcaacacactggccgcaggcaatacattggtttggatcatagcggtaaaaaggatgagacatatcaaccgcgcaagaaggatcttcttttggcgtgtatgggtatttttgatgctcgatccccatcatttccgctgtattatgcagcgtacagttgccattgttgttatcgcaaactgtacaatacagcaaatgattttcaagaaggcggtccatcgcttcggtttgcgcttctttcactcgatttcctgaaagatcaattaacatcccgttttctgcaaccgtcgcgcatgaacgaaccagcttgccatttgcttctactatgcaagtatcacaagtttgaatcgggtcaacctctggtacgtggcaaatctgcgggtattcaattccgttttcatttaaaatatctaaaattgtggcccctgctcgtgcttgaatttctgttccgtctacacggacactgatcgacttaacgtccatcatattcatattcccctccatctttctttcaagaagtcaaaaaaagccatgtatagatacacctgcccttaattctaagaaggtgtaaacacacatggcggaatagttcactagcaagtcttactaacagaccaatccttgatttttataaaacgatagactcataacaagatcctattacaaatccatcaacactgcttttattataatgtgatatttattataatacaatatggcaggaaaattttaaccaagtgaaatgtcctgaggggaaccgggaaaagcctttataaggcaatatcggaaggggtaatcagcatgtctaaaaaaattcatgaattcaatgatattattcgaaaacttcgcaaagaattgttcggaaaagggcctgagagaattcatactgtatttgtagaaaacatggcagtttcaacactatacggaaatctgagtgcaagcgagcagtttatcgcccgcacgcctgaaggaagagagatggtacatgcggcccggacaagcctaattcaagacctttattccaaacaaacaccggaaggaatggaggaactcatgggagctaagctagtccatttgttttctgatattaaaattgaggaaaacatcgctgtatctgtatttgtttttgaccgaaaaatagatgagcaaaaagaagttctgcaaagctagtatatttgtcattgacacaaatttgtcacatttgatatgatgttgctacagttatagaaggctaaagcaatggaatgtatgcacgaactgtatatattctctttcaatatcttatatactgcttgatattgttgtatgggtatgcatacaagttaggcagcattcaaacgcctggtttgacacaggttatttgagtgctgccttttttattgcctttcttgcataactgtgagaaaagaagaagtaatggaggcgttttattatggcttttcgaaaaccggatgaaatagcggaagcagcaattgaagcagggatgaaaaaaatcaagctcccgctgccgtcactgcttgtgctggggtttttaggcggtgcatttattgcgcttgggtatttgcttgatatcagggtaatcggcgatcttccgaaagaatgggggagcctgtccagtttgattggtgcagcagtatttccagtcggcctgatccttgtcgttctcgctggcgctgaactgatcacaggcaatatgatgtcagttgcgatggcgttattttcgagaaaaatatcagtaaaagagttagcgattaactggggaatcgtcacaattatgaacttaatcggcgcattgtttgttgcgtactttttcgggcatttggttggattgactgaaacaggtccttatttagaaaaaacgattgccgttgcccaaggaaagcttgatatgagctttggcaaggttctcatttccgccatcggctgtaactggcttgtatgtcttgcagtgtggctttctttcggcgcccaagacgcagcaggaaaaatccttggcatctggttcccaatcatggcttttgtggctatcggatttcagcacgttgtcgccaacatgtttgtgattcctgctgccatttttgcaggctcattcacgtgggggcagttcatcggaaacatcattccggcttttatcggtaatgtcatcggcggagctgtatttgtcggtctcatttattttattgcatatcataagaaagaccactccagaaaagaaatgaagcaggtgtcatgaccaacgggcaaatccattcgatgatttgcacaatttccgtccatttttagaaaaagatgtttacaaaatggaatttggtggatatacttacaaagtaagaaaaaagcaaaggaggctgaaccaaaatgacaatgagacaacgacgtcaacctgtacgtgatacacatgtaaaagttcatggtttattcagcctgtggaagagttcgtgtccttccttaaccgatgcttatcgcacgcattaaattcggaatagtcggacatacgcaactccccgcaggcagtagaggcattggtgtcttcttttgtctgcggtttttatttgcccgcggcagaagggttgtgccgcgggttatttcgcttgatgcggactttgaaagggggtgagcgatatgacgattaacctattctttttaacgttaacgattaaaaaacggtttaaaagcctggaagaattcgaacgagaacagcagattgagcagatttatgatgaaatgaaagagtctcagttaaagcatctttatttaacgaactggcgctaaaagcaacgaaaaaaactgaagggggaatggcatatgcttagaagggaattattgatgcattatacaatggagaaggaccaagtttagcgaaacagctgtcaagaaaatgcgcgcctgcatatagtaaatcaacgttattgtgaggcaggtgatggcatgatgaacgattatcaaaaaagactgccgtcgattggccatggttatgcgtccatgccgcattccttcaaacatggttatggaaatccattccgacagcagaggctgatggcaatgcagcagcaaaggctgtatgtattcccttatcattggcattagaaagagggcagaaaacattatgttttctgcttttttttcggaaaaaaatgaaaaagtttagttctattgaaacatttttaaatacattgccgtctagttggtaccttccttcacttttagaaatgaagatgatgtttatttttttaagataataaataaacataggaaaccaaaagcaggtgtttaaattgctagaaaatagactctataaacgatcgaattttcggaaattattttctcggaaatataagctaaccaaaacaattgagcatatgatgattgattctatagatatacaagaaaatgacagaattttagaaattggaatcggaaatggcactgtctttaaaagcataaccaagaaactagaaagggaagcctaaaaagcattgatccttcaaagcgaaaggtaagtcagatatcacgtgcgaatcgaaagaatatggggaacggggaggtttttcatggctatccagaggacattccctttgatgaccgtacctttaataaagtcttttctttacatacggttcagagctgcaccgatattaggcttgcattaagagaaatttacagggtgcttcaaattgacggccggttttatatcagtattgacacaaataccggtgaaaaagggaaaacgtatattcaactgctgcaagatcagcattttagggatatttctgttatcaggcgtgattcctgtctatgtattgtggctgttaaataaaaaatttctcgggaaatatatccaagatcctcgcatcaggatttgggtatattttcttaattttttattttttgcatatactttatattaaaaaaagtttttttcatttaaaattataacagaagaaagaacaaagaggtgatttcagacagggcagacattctttgtgaacaaaaggaatgaatattcattccgcaaacgaatcggaggttgtcagattacatgttatccgcatccagcagtaaatacgacatgattatgaaagcgtcagtctcactttttacggaaaggggttttgacgctaccaccattcctatgatagctgaacgtgctcatgtagggacaggaacgatctatcgttattttgacagcaaagaaacactcgtaaacgtgctgtttcaagaaagcatccagcgatttacggaaaaactgaagcaagacgtttcagaattgcctgtcagagaaggctttcaccacgtattttgctgtctcgttcagtttacgaaagagagcgactatgcgcttttttttcttgaaaccaaaaaagatgctcattacttaaatcatacaagcaaaaaaatgatagaaaatctgactcaaatgcttgatgactattttaataagggaaaagcggaaggcgtgattcgcagcctgccctctaatgtgttaattgcgattgtattaggggcgtttctcaagatatatcagctcgttcaaacaggtgatatagagatggacactgatttaattactgaattggaacaatgctgctgggacgccattaagcttcattcatcacaaaaataggaaagggagatgttaatgaaacaggcaagcgcaatacctcagcccaaaacatacggacctttaaaaaatcttccgcatcttgaaaaagaacagctttctcaatccttatggcggatagctgatgaattggggccgattttccgttttgattttccgggagtatccagtgtttttgtatcgggccacaatcttgtggctgaagtgtgtgatgaaagccgctttgacaagaaccttggcaaaggcttgcaaaaggtgcgcgaattcgggggagatggcttatttacaagctggacgcacgaaccgaactggcaaaaagcccaccgcattttgctgccgagttttagtcaaaaagcgatgaaaggctaccattctatgatgctggatatcgcaacccagctgattcaaaaatggagccggttaaaccctaatgaagaaattgatgtagcagacgatatgacacgtctgacgcttgatacgattgggttgtgcgggtttaactatcgattcaacagcttttaccgtgattcacagcatccgtttatcaccagtatgctccgtgccttaaaagaggcgatgaatcaatcaaaaagactgggcctgcaagataagatgatggtgaaaacgaagctgcagtttcaaaaggatatagaagtcatgaactccctggttgatagaatgatagcggagcgaaaggcgaatccggatgataacatcaaggatctcttgtctctcatgctttatgccaaagatccagtaaccggtgaaacgctggatgatgaaaacataaggtatcaaatcatcacatttttaattgctggacatgagacaacaagcggtttgctttcctttgcgatttattgtctgcttacacatccagaaaaactgaaaaaagctcaggaggaagcggatcgcgttttaacggatgacacgcctgaatataaacaaatccagcagctcaaatacactcggatggttttaaatgaaaccctcagactgtatccaacagctccggctttttctctatatgcgaaggaggatactgttctaggcggggaatatccgatcagcaaagggcagccagtcactgttttaattccaaaactgcaccgggaccaaaacgcttgggggccggatgcggaagatttccgtccggaacggtttgaggatccttcaagtatccctcaccatgcgtataagccgtttggaaacggacagcgcgcttgtattggcatgcagtttgctcttcaagaagcgacaatggttctcggtcttgtattaaagcattttgaattgattaaccatactggctacgaactaaaaatcaaagaagcattaacgatcaagccggatgattttaaaattactgtgaaaccgcggaaaacagcggcaatcaatgtacagagaaaagaacaggcagaaatcaaagcagaaacaaagccaaaagaaaccaaacctaaacacggcacacctttactcgttctttacggttcaaaccttgggacagctgagggaatagccgatgaattggcttctcaaggccgccagatgggctttacagctgaaacggctccgcttgatgattatatcggcaagctccctgaagaaggggcagtcgtcattgtaacggcttcttataatgggtcgccgcctgataatgctgctggctttgtagagtggctgaaagagcttgaggaaggccaattgaaaggtgtttcctatgcggtattcggctgcgggaaccggagctgggccagcacgtatcagcggattccccgcctgattgatgacatgatgaaagcaaagggggcatcgcgtttaacagagattggggaaggtgacgccgccgatgattttgaaagccatcgcgagtcttgggaaaaccgcttctggaaggaaacgatggacgcatttgatattaacgaaatagcccagaaagaagacaggccttcattatcgattgcttttctcagtgaagcgacggaaacgccggttgctaaagcatatggcgcgtttgaaggggttgtgttagagaatcgagaactccagacagctgacagcacgcgttcaacccgccatattgaattggaaattccggctggtaaaacatataaagaaggcgatcatatcggaatcctgccgaagaacagcagggagcttgttcagcgggttctcagccgattcggtttgcagtccaatcatgtgataaaagtaagcggaagcgctcatatggctcatctgccgatggatcggccgatcaaagtagtggatttattgtcgtcctatgtagagctgcaggaaccggcatcaaggcttcagcttcgggagctggcctcttatacagtttgtccgccgcatcaaaaagagctggaacagctcgtttcagatgatggcatttacaaagagcaggtacttgcaaaacgtcttaccatgcttgattttttagaggattatcctgcttgcgaaatgccgtttgaacggtttttagcacttttgccatcactaaaaccgagatactattccatttcaagctcaccgaaagttcatgcaaatatcgtgagcatgacggtaggagttgtgaaagcctcagcatggagcggccgaggtgaataccggggtgtcgcctctaattatttagcagagttgaatacaggtgatgcagcagcctgcttcattcgtacgccgcagtccggattccagatgccggatgagcctgaaacgcctatgattatggtcgggccgggcacaggaattgcgccattcaggggctttattcaggcaagatcggttttgaagaaggaaggaagcacccttggtgaagcacttttatacttcggctgccgccgcccggaccatgacgacctttacagagaagagctggatcaagcggaacaggaaggtttggtcacaatccgccgatgctactcgcgcgtcaaaaacgaaccaaaagaatatgtccagcacttgctcaagcaagatacgcagaaattgatgacactcattgaaaaaggggctcatatttacgtatgcggtgatggatcacaaatggctcctgatgtagagaagactttgcgattggcgtatgaagctgaaaaaggagcaagtcaggaagaatcagctgaatggctgcaaaagctgcaagatcaaagacgttatgtgaaagacgtttggacaggaatgtaaaatataaaatcccgccaatctgattggcgggattgctttgcatatgagaaaaccggcacgataatgaaatctactgaaaaggatgttatagggagtatcgcgccggccttattattcatatcggcatgcagaggcaaaagtttagttctttttgccttatttttaaaaatgaatagtctaaaagtcttgtttttgattttcaactcaggcttttggcattttgttcttgcttattccttaagatcagtcatctgttgaagattgatgcttgaattgctgttccacatgcttacggtaatgaaagtcatgaatcagccgaatggtcggcctaattaacagcagcaaacttccgatcgcaaacagccatatccctgccgacattaatcggtcataaaaaaagaaaaagctcccgacgagaaacaaagcaccaatgataaaatcgtttactgtataaagaatcttatatcgttttttgaaaaaaagttcatatcgtttcagctctttttggaagtcatgttcttcatttactgtcaccatcatccctccattctattttggcttacccttacgtaaacggaatgtaaacataagggcagccttgctgaaaggagacataatcaacgatcagaaactaaagtgaaaaagtgatccgcataggatctcttttttatgatttcatcgcctgaacaataagagcggtcaaagcttttgcacctttaggaaccaagtgaacaccatcaggggtaaaatattccggatgctgaagggcttctgtatgccagtcaactaacgtaacattttgatgtgcgcttgcctggtgctgtaaagattcattaaccttgctttcccattggcggggaacccgtgtattgacaagatagatatgggcttttgagaaagattgaagcagttgttcgatttggctgtttgtaaagtagccattggttccaagctcaatgatgacagccttgttcggctgattaaaagacttgtactcccttgcgagttccaaagcttgagacatttgtcttcctacctttccatcaatcgtcacatgtgaaagtgactgacgcaggtgtgaagaaatatcaagcatgacggaatctcctatagctaacacctctttcgcagtatctgcgggttctttcgtctgttgagattgcgtgtctttctttttatgagtctcttgcccactatctttgttttccttttgaccctgaatggaatctgttgttttttgttcaggattgtgttttttatctgctgcagcgttctttttatccccagaagcctggctggtgtcagcatttgtttcttgtgagctataggtccatttggtagggtgcttttgctctccggctaacccagacagccctcctgcaaaaataagtatagcgaaaatgacgaaaccaattgacagtttgctgatgacagatgtcgttttccattccttgattctatgtataaaaacacagcggaaaaatgacctaaatccctgtgtccgtatcggcttctcaataaaatgataggaaagctcggcaagtatacatgtcacaatcacctttagcacgatatgccaaagaacagggtttccgatttcttgaactggcgtgcttaacacaataacagggtagtgccaaagataaattccgtaagacctcgttccaagccaccgaagcggcctccatgtaagcagattgcctaaaaagctgctcggatggcaaacacatgcaataaggattgcggcagtcacgctaatgaatagcattccgcctctgtaaagaaaaggctcgtattcatctgtgaaatagacacacaacactaaaatacaaaatgccaaaaattcagtggcgtgcaaagtgtgtttcagtttgcttggcagcctgttggaagacagccttttcatcggccataccaaagccaaggcacatccgatgagaagttcaaacgaacgagtgtctgtgccatagtaaacgcggctcggatctccgccaggttcatacagtacgctcatcatcacggctgaacaaagcgcaagcaatgatatcaccgcagccaatctggcgcggcttttcattatgtacattccagcaactaagaacatcggccatatgatataaaattgttcttcaatcgccagcgaccaaaggttttttagaggtgatggggaaccgaaactatcaaaatatgatagcttgtgaaaaataaaccaccaattgctcatataaaagagagaagagatcgcatctccacgtacagtgtgcaatagttctcgatcaaacaatacgacccacacaacagtggaaaagatcataaggtacgctgccggcagaagccgccgaatgcggcgcacccaaaagtcccgaaaatcaagattgatatcatttccatatgccggtaatagaatggatgtaatcaaatatccggataaaacaaaaaagatatcaactccgataaaaccaccgttagcccaattgaaatttaggtgataagcgataactgacaggacggcaaaagcgcgaaggccatcaagtccagggatgtatcgatgatgctgtgtcttgtgatacatgggtattcctccaatagtaagcaaatattcttgttgtttttgatagcgaggttacgacctcgaatagagaagagagaaaacatccataatcttagatggatgtttttattttatcgaatataacgttctcccacgagcaagtttgaaatgacgctggttggaattgtaaactcggtaacgcccatatagccgggggcgacttcatattcgtcaaatgagatcacaagtttatggtcttcagtaatgtaaaacgtctgatcaggaagaatcgttttgaacggttctgcatcttcgtcagtgagccaatatattttatttggatcttccttcatttgctgtttcatttgctctctaatattttgactgatgactttaatatagcgctcatctttgaataagctttttaatgtaagtaaaatatcattctttttgtcaattgtaatataacggctttgtgtgtaggaagatgcttgtgttttttcaatattgcgccggatagagagtaaatctggcgtgtctgtgaccgtctcgtaatcactgtagatgctgagatgcccttttttgtttttggatgtggactgtataaactctttatacagctgctggctttctttcaagtatttttggttaatgctgttttccagctctttattagaaagcccggacaaagcaggtgttttgacatcaatgcttgattggtctttttcctctttgatttcaataaaggtgatcgctttgacgattttgccgatgacagggatccttgacatagcctgagcagcgtcagggttgatattaacaagcgcagtgaataaaatagctgcagcgattgctgctgatgtcggccacatgacgattcttttcttttttggttcttgctgaagggctttttcaacaatgatatccaattctttaggaatctgaacatttttatattcttctcttaattgctgtaatctcttatccattaagaaagatcctccttcgtcagctgaatgcgcatcagcttcaatgctctgtataggcgcgttttgacggtattcgtgttttctcctgtaatttccgcaatttcttctaatttgaggtcttcaaaaaaacgtaaaataataatggttttatagcggtacggcaattcgtcaagcgcttcatagagatcagtatccttgtaatggtcttcctttcctttgcttaaaaattctatcgtttcgtcgtccatcactcttatctttttttgtttgcgcaaaaaatcaatggctgtccgcactaaaattttataaaaccagctttttatcgtctcagggttcctgaccgtttcaactgagctcagcgctttttttatcgattcctgaacaatatctaatgcgtcatcttgatttttcacataactgaaagccaacctgtagaaatcttgcttatggtcagttatgcatgtgacaagcaacgcttttgttgtttgttttttcttcattgcaataaagggctcctttttgaatatacgtatatcgtaggctgttacctaggatagacgcggcaggctgaaaaatagtttgcgcagaatcacatttttttaaaagagagaagtaaatcagcatggggggtttatgcataaaaaaacaaggcttgttttgtacaagccttgttttggttaagcgatgcgaatattattccaaataatgttttttgaaatctgaatggatagaaaatttacggcgcaactggatgagatttttcccgaagctctcttctaaaagctctctatgctttttcagaatttccatgaggtacagatcatgaatgatcacttcagtaataggcatgactaaacctacatgcatcgtccatgcagcacggctgtcgttgccaagtgagacaatgcccgctacgacttctgaatcatctccgctatagacaagccaccgtccgtcatactcttctgtaatttcactgctcatatcatgaaggtaaacattggcaaaatcagatacgatgtctccgtacgcaataatggtgacaataacgccttgttctgccgcctgtttgagctctgcttctatctcctcaaaatcctctttccatatttctaagaggattctttttttggcagataaaatacaagccttcaccttttcaagaatttcactgcggccggtgatattccagatgttttcccggtcattagcagtctgctcgaacttttcaaaatatttctcagcctgatcaaaatgctcttccgctttgagccggcggtttttaatcagttcttttgcggggacaggaacatactgaggcgtatttccatgactgacaaaaacatctccccttaacacaaggctttccaagacttcataaattttagaacggggaactccggattttttggcaacggcatagcctgttaaaggtgattcttgcaataatgccaaatacgctttcgattcatattctgtaaaattgaggttttttaaaatgtctaacatattttctttcatatatcctccaatataaagagcaatcgctgccttagtaatcgctattttaacaaaccatattgatttattccaaacacattgatacactttttataagtagttacttttgtagtcactatatgattaaggggattttttaaagggggagagaacaatgcacagcttactcgcatacataccgatcgctgccatgatggttatcataccgggggcagatacgatgcttgtgatgaaaaatacgcttaggtatggcccgaaagccggccgttataacattctcggattggcaacaggactttccttttggacggtgattgccattttaggattatcagtggtgatcgcaaagtcagtgattcttttcacaacgatcaaatatttgggagcggcatacttaatttatttaggtgtaaaaagtttttttgctaaaagtatgttttcgttagatgacatgcaatcccaagcaaaaaatatggcaagttctccgaaacgttattataaaacttcctttatgcaaggatcactcagtaacattctcaatcctaaaactgttttggtgtatgttacaatcatgccccaatttatcaatttgaacggaaatataaaccagcagctcattattttagcttcaatcctaaccttattagcggtgttgtggttcctgtttcttgtttatattattgattacgcaaaaaaatggatgaaaaactcgaagttccagaaagtgtttcaaaaaattaccggaataatattagtaggtttcggcatcaaaactggtttgagttaacacttaaatgaagtgaatgaaatttgcaaccaaagtttaatttagtgtttgacccataaaaaagacaagggagtgagtatcccttgtcttttttttatttcatcttatgtcctctgcgggtttgtaccttatacaaaataatcaataaaacaaaccagaccggggtgacaaacaaagcaatacgtgtatcatccgcgagtgccaatatgacaagaatgaacgcgagaaatgcaagtgttaaatagttggataatgggtaaaaaggcattttaaatttgtttgctttcgcttcatgctgccttgtttttcgatatttcaaatggcaaatcaccgtgatgccccaaataaaaatgaagcatattgtagaaacacttgtaatcagtgtgaagacttgctcgggcattaaataattcagactaacgccaatcagaatggcgatggatgaaaagaacagcgcattgcttggcacgttagaagaagttaatttctttaatagtccaggtgcgtgatgatcctttgcaagcgaatagaccattcggcttgtgctgaataaagcgctatttgcagctgatgcggctgatgttaatacaacaaaattgatcaaactggcagccacaacgatgcctactgcagagaagacctgaacaaatgggctttcgtttggattcaacacattccaaggatagatacacataatcacgaaaagtgcgccaacataaaaaagtaaaatccggacagggatttgattgatggctttagggatcactttttggggattttctgtttcacctgctgtcagtccaacaagttcaatacccacgaaagcgaagacgaccatttggaacgataggataaacccatgccatccatttgggaacatgccgccgtggctccaaaggttggtgaggctggcagggccggaagctgcggaaaaacctttcgcaatcaggaaaataccagttacgatcagagccagtatggcaatgactttgatcaatgcaaaccaaaattctaattctccgaaaagtttaacggtggcaaggttcatgatcagcaggataataagcgcaagaagacccggcagccattgaggcacatcgggaagccaatattgcgtataaatgccgaccgccgttaaatcagccatcgcgagggagatccaacagaaccagtaggtccacccagtgataaatgctgccatgtttcctaaatagtcccttacaaaatcaacaaaagagtggtatcccgcatttgataagagcagttctccgagcgaacgcataatgaaaaaacaaaatacgccggtgatcaagtaagcaaataaaatggagggtcctgcaaaatggatggatttacctgaacctaaaaataaacctgtaccgattgcacctccaatcgccattaattgtatatgcctgtttttaaggcctctagacaatttctgttgctggccaaaattgtctttgctagaattgcctatcaattttattttcctccagtaataaaaagatgagtaaagttttatcggatattataacatttaaaagaatagatacttttatttttaaattttaaaactattttaagtgctgttacatgtcttctggctctatttttcactcgtgattctacctgaatagcagagtaaaacaggaaagtcatttggacaatctgacaggctagttttaatcggtaacgatttgtataattgcatacccactatgtttgagacctgcaggggggatcaaatcgagagaatcggagataaagtttttaagcttacagatttcttaaccttcaaagtggattgcaaaaatgacgaagttttgcaaattgtaatactgtggcggtcacatattgtgtccgtctttttagttgtgagcgaacttaagggggttatatttgggtaatttgtcatgatctataagattcattttttgtcattgatgattttgacatcattacattccccgagaatgataaactgtttactgattattacttttgaaggggactggccctccagaactgagcatctatcatactaatatgagatgcaaatgattcaacatgtaaacatatacgcataaaagccagttttgtcaatctgctatagagacctttttaaacgtgtatcagcagataatctcaacgcggactataaagtttcgaaatattcttgttaatggcttatctaataaggacaaaggatgatagacgtgagaagaatagataaaatataccatcagctcaagcataattttcatgattcaaccttagatcatcttttaaaaatacaagggaattcagcaaaggagattgccgagcagctgaaaatggagcggtccaatgtcagctttgaattgaacaatctcgtccggtccaaaaaggtcatcaaaattaaaacgtttcctgtaagatacatcccagtcgagatagcagaaaaattattcaacaagaaatgggatacagagatgatggaagtgaaagaccttcaggcgttttccggaaattcaaagcaaaatcatcaacacatttccacgaatcccctagagcttatgataggggcaaaagggagtttgaagaaagcgatctcccaggcaaaagcagctgtcttttatccgccgaccggtctgcatatgctcctcctagggccgactggttccggtaaatccctttttgcgaaccgaatttaccagtttgccatttactctgacatattgaaggccggcgcaccatttattacatttaactgtgcagactactacaacaatcctcaattattgctttctcaattattcggacacaaaaaaggttcatttacaggtgctgccgaggataaggcgggtttagtcgaacaggccaatgggggcattctttttatggatgaaatccaccgtctccctcccgagggacaagaaatgctgttttattttattgacagcggttcttataacaggcttggagaatctgaacataaacgaacatcgaacgtattgtttatttgtgcgactacagaaaatccgagttctgcactattgaaaacgtttttgcgaagaatcccaatgaccatacatattccttcgcttgaagaacgatcacttaaagaaagagtggatctgacgacgtttttattagggaaagaagcagagcgaattaagaagaatctgagtgtgcatatcgatgtctataatgcgcttattcactctgcgaaatttgggaatgtcggacagctgaaatcaaatgtccagttagtttgcgcacacggatttttgcataaccttgacagaaatgaagttattgaactgactgttcgcgatctgcctgatgaaatcaagcaagaatggatgtccagcagcaaaaacatgcaaagaagcaaagccatttctgaatatgtcaatattacaacgattatctctccgattgtagaagatgaaacaacaaaaattgacgaagacctctcatttaacttatatcatttgattgaggaaaaagtgaaaacgcttatgaaagaaggtttatccaaaaaggatattaaccagtacatcttgactgatgtccatttgcatgtcagaagtttttttcatcatcaagcttttcaaaaagacaacctgctgacattcgttgaagatgatgtgattcaaatgacaaaacagttaaaagaaatagctgaacatgagctggattgcacatttgaccgtaagtttatttatttcttgagtatgcatattgacgcatttttaaagcgaggaaagcaaattgatgttttgaatacacaggagacagatgaaattcgtgatactcatgtgaaagaatatcgggtggcgatgatttttaaagataaaattcaggaatattttaaagtggctattcctgaaatagaagtcatctacttaacgatgttaattcattccatcaaatcgttaaaggagaacaaaagagtcggtattatcgtggctgctcatggaaacagcacggcgagttcaatggttgaagtcgcgacagaactgctggggagtacgccgattgcagcagttgacatgccgcttactgtttcaccttcggacattcttgaatgcgtagcagaaaaaatgaaacaggttgatgaaggcgaaggtgttttaatgctggtagatatggggtcgcttgcaatgctggaaagcaggctggaggaaaagacaggcatctctattaaaacgatcagcaatgttacgacttcaatggtgctggatgctgtcagaaaggtcaactatttgaatttaaatttgcatgcgatctatcaatcggtcacgaaggattttatcgagttgtgggagcgtcagccagcggcacccggcaaaaagaaggcattggtatccatctgcaccacggggagcgggacggccaaaaagctggaagacattctaaccacgatcgtaaacaaggcctccgatacaccgattcacatattgaccgtatcatcgattaagctggccaacagcataaaagaaatcgaaaaagagtatgaaatccttgcgacagtcggaacgaaagaccctaaaatcaatgctccgcatgtatctttagaagtgttaattgaaggggagggagagaagctgattcaacaggcgattacaaaaggaagcatccccttgagcaatggattgaacgaagcaaatatgattgtcagggagctttgcgaggatagcctgaaaaaataccttgtcttcttgaatccccatcatgtgatcgaaatgttattggagtggctgcaaaccgttcaagatgagctgggggtcattttcaataatgcggttttgatcaaagtcattatgcacacggctttcgcctttgaaagggtaattaagcaaaatccgatcgctttctcagaggaagaagagatcaatgatcagctgaaggaaatggtgtacgtgacagagcgaacattagccccttatgaagaaaagctcggacttcgcataagtgatgatgaaaaattatttatagccgccatatttgctgaagaagtgcatggccagctgttttaaaaacagttttttcatatgaacctgtattaaatggaacaccattttaatacaggtttatttttttcgttttaagtgtttcaacaacaaattgcgattggctgaaataacaatgaaaacgcttaacacaactgtgttggcacgatccttgcattatatatggatgtacaaaacaggaaaggagcaatagatatgatttcagttattatcagcggtcatggagattttcccatagcattaaaagaatcttcagggatgatattcggtgaagaaaataacctgattgcagtgccgttttttaaaggggaaggaatacaaacgctgcaagaaaaatatcatcaggcgctcaaggatatcccggaagaacatgaagtgctttttttagtcgatatttttggagggacgccatataacgcggcagcttcctttattgctgaggatcaaagaatggatatggcagccggcgtaaacctgccgattctgctggaggtattaagccagagagaacatctggctctcaaagatttgctgaacaacttaaaagcaatgagtcagcaaagctttcaagtgtgcagtgaacatttagaaaaagtaaaaacagccaatcaagatacaagagaggatgaattatgatgaacattgtgttagcaagaatcgatgaccgctttattcacggccaaatcctgacaaggtggataaaagtccatgcagccgaccgaatcatcgttgtctccgacgatattgctcaggacgaaatgagaaaaacgctgatcctttctgttgcgccttcaaatgtaaaggcgagtgccgtctcggtttctaaaatggcaaaagcatttcatagtccgcgctacgaaggcgtaacagcaatgctcttgtttgaaaatccgtccgatattgtatctcttatagaagcaggtgtaccgatcaaaaccgtaaacgtcgggggaatgcgttttgaaaatcaccgcaggcaaatcacaaaatcagtcagtgtcacagaacaagatataaaggcatttgaaacattaagtgacaagggcgtgaaactggaattgaggcagctgccttcagatgccagtgaggattttgtacagattttacggaacgtaacaaaataatcaaggggatgagaatatgtcttcattacaaattattttgttgttaatcattgcagcaatcaccggaatcgcaagtgtattggatgaagggcagacacaccgtccgcttgtggcctgtacgttagttggcttggtgctcggggacttaaaaacgggaattattcttggaggcacactggagctgatggcgctcggctggatgaacgtcgggcttgccatggcacctgatacagcgatcgcctctgtcatctcaaccattttagttattaccgctgatcagggaattggcgaagggattgctgtcgctgttgctttagcagctgcgggtcaggcgctgacgatttttgttcggacgatcactgtctttttcatccaccgcgctgatcaatatgcaaaagcgggaaatataagaggaattgaaattatgcatattaccgcgatggtgtttcaagctttgcgcgtcatgattcctacattgattgttgctttaattagtgtcagcgctgttcaggcgttcctgggaaatattcctgatgtcattacaaaaggactgcaaataggcggaggcattattgtggttgtcgggtatgccatggtgatcaatatgatgaatattccttatttaaagccatttttctatattggtttcttattagcggcgtttaccgattttaacttagtgggatttggagcccttggtctctgtctggcgcttttataccagcaggtgatgcaaaaacaaagcgctcacggagcagtcgcggccgcatcagacagtggcagtgttgctgtttatgatgacgatgatgatcttgatgcctaaacgatgaggggggaagaaaaaatggagaaagaaaaacgattaacgaaaaaagaaattttcagcatgtttattcgttcaaattttttactcggttcctttaacttcgaacgtgtgcaggcaatgggatattgttatgtcatgataccggcgatcaaaaaattgtacggtcccggagcgaaaagaaacgaagccttgcagcggcatttggaatggtttaatacacatccgtggctgacagcgcctatatttggtgtgacggcagccatggaagaagaaatggcgaacaataaaggaattgacggaaaagcgataagcggaatgaaaatcggtttgatgggaccaatagcgggcgtaggcgacccaattttctggggaacgattcgtcctgtcttagctgcgctaggagcctcccttgctttaggaggaaacattgctggccctttgctattctttttcttgctgaatgccataagattaagcacaaaatattatggattaaagtatggctatgtgaaaggaatggagattcttcaggatttagcggggaatcgcattcaaaagcttacagagggcgcttcgattctcgggttatttgttatgggggctcttgtgtccaaatggaccaccatcaacattccaatcgttgtatccaggattaaggatgaaagcggaaaagtagatgttcaaactgtacaaaacgtgttagacagcattatgccgggtgcgctgcctctcggattaacgttattggtggcatggatgcttcgcaaaggggtgaatcctcttctcattatttgcggcatctttgtcatcgggattctcgggtattgggctggattcttagcataaggtgtgtgaaggaaaaagagagaaactgcagcagtcttctcatatataaatcattcggataacagcgaaacagaggagaattgccagaaacggaccagcttgcttagcagtctctctttaaagtgttcaaacatgaagagaggagcgaaggaacaaatgaaaaagagacttattcaagtcatgatcatgttcaccctgctgttgactatggcattttcggcagatgcagccgattcaagctactatgatgaggattaccgtcctcaataccacttcacaccagaggcaaactggatgaatgacccaaacggaatggtatattatgccggggaatatcacttgttctatcaataccatccatacgggcttcagtgggggcccatgcattgggggcatgccgtcagcaaagatttggttacatgggaacaccttcctgttgcgctgtatccggatgaaaaaggcacgatcttttctggaagcgcagttgtagataaaaataacacaagcggttttcaaacaggcaaagagaagccgcttgtggccatttatacacaggatcaggaaggccatcaagtgcaaagtattgcctatagcaacgacaaaggaagaacatggacgaaatacgctggcaaccctgtcattccaaacccgggtaaaaaagattttcgcgatccaaaagtcttttggtatgaaaaagaaaaaaagtgggtaatggtgcttgcggccggtgaccgtatcctcatttatacatcaaaaaatctgaagcagtggacgtatgcaagtgaatttggtcaggatcaaggaagccacggaggagtatgggaatgcccggatttatttgagcttccggtagacggcaatccgaatcaaaagaaatgggtcatgcaggtcagtgtcggaaacggagcggtctcgggaggatcaggcatgcaatattttgtaggggactttgatggaactcattttaaaaatgaaaacccgtcagacaaagttctctggacggattacggcagagacttttatgcggctgtatcctggtccgatattccatcaacagacagccgccggctatggttagggtggatgagcaattggcaatatgcgaatgatgttccgacatccccatggagaagtgcaacgtccattccaagagagttaaaattgaaagcgtttaccgaaggggttagagtggtccaaacaccagtgaaagagctggaaaccattcgcgggacctctaagaagtggaagaatctgaccatatcgcctgcaagtcataatgtgttagcagggcaatctggagatgcctatgaaataaatgcagaatttaaagtaagccctggttcagctgctgaatttggttttaaggtccgaacaggtgaaaatcaatttacgaaggtcggctatgaccgaaggaacgccaaattgttcgttgaccggagcgagtcgggcaacaacacctttaatccggcctttaacaccggaaaagaaacagccccattgaagccggtaaatgggaaggttaagatgcgcatttttgttgaccgctcttcggttgaagtatttgggaatgacggaaagcaggtcataacggatattattctcccagaccgatcaagcaaagggcttgaattatatgctgcaaatggcggtgtaaaggtaaaatctttaacgatacaccctttgaaaaaggtatggggaacgtcaccttttatgtccaatttgaccggctggacgactgtaaatggcacgtgggccgacacaattgaggggaaacaagggaggtcggacggagattcctttatcttgtcttcagcatccgggtcagacttcacttatgaatctgatatcaccattaaggatggaaacggaagaggggcaggagcactaatgtttcgctctgacaaagatgccaaaaacggttaccttgccaatgtggatgcgaagcatgacctagtgaaattctttaaatttgagaacggtgctgcttctgtcattgctgaatacaaaacaccgatagacgttaataaaaagtatcatctgaaaacagaggccgagggcgatcgctttaaaatctatttagatgatcatcttgtgattgatgcacatgattccgcattttcagaaggccaatttggcttgaatgtgtgggacgcgactgctgtctttcagaatgtaacgaaggagtcttaattttaaaaaaggcacagacctgaacagtctgtgccttctcgttttattttaacaaatttaatgattcgcggttaaatgcttccaaatcatcaggtgttctgcttgtgacaatgttgtggctgacgactacttctgcatctttgtagtttgcaccggcattgattaaatctttgcggatgctgcggtagcctgtgatatctttgccttttagaagatccgtatcaatcagtacttgcgggccgtggcaaattgcgaaaacaggttttttgttttcgacaaatgcttttgcgaattcacccggacggtcatctgcacgaagcaaatccggagagaatcctccaggaattagaagtgcatcaaagtcacttgcatccacatcagagatggctttgtcaatctttactttctcgccatgtttaccggtgacttctttgccggcttccaaatcgatagccacaacactgtagccagcttcttcgtatgcttttaccggacttgtatattcgatgtcttcgaattggtctgtaacaagaactgcaatttttttgctcataaaaaaccctcctaataactctctattcatagaataacaggaagattgaccggccttcaaaatatttgcttaacgagatcgtttttcgtgagtttcattataagcggttcagcccatataaggattaacctattacaatgtggaaatatcaatcacaaatcgatagcggacatcgcttcggaggatacgttcgtatgcttcgtccacttggtcagctccgatgacttcgattttaggttcgatgccatgctcagctgcgaaatccagcatctcttgagtttcttgaattccgccgactagagaacctgcaatgctgcggcgccccatgattagggaaaacacactgtatgtgtccggcttggcaggagctccaacgtttacaagtgtcccgtctatacgaagcattgataaataggcatctacatcgagatttgccgataccgtatttaagatcacgtcaaaacgcccggccaatgcagtgaatgtggctgggtcacttgttgcaaagtaatgatttgcaccgagttctagagcttcctctttcttattcatggaacggctcaggacggttacctctgcacccatcgcatgtgcaaattgaatcgccaaatgtccaaggccacccacgcctacaatcgcaacttttttacccgggccaacattccagtgtttcagcggagaatatgttgtgatacctgcacacaacagcggactggcaacatccatttccaaacgatctgggattcgaacaacaaatctgtcagtgacaacgattttttggctgtacccgccataagtggggtttccgtcgtagtctactgagttatacgtttgaacaacacccttcgtgcagaactgttcctctccgtttagacagtattcgcattctccgcatgagtcaacaaaacagccgacaccaacgcggtccccgacagcaaatttggtgacttctgctccaacggctgttacgacaccggctatttcatgtcctggcaccattgggaagatgccaccgccccattcatcaaaagcactatgaatgtctgaatggcaaataccgctgaatttaatatcgattaagacatcgtgcggccgtaatcctcttcgctcaatcgtcgtttgttcaaatttggcttttgcatgtgacacgcttaatacacgggtttgatgttgattacacatacgaacctatcctttcttcatcataagtgttgtaaataaaaacatgcacttatttatgttttatggtgtcttcaacataacgataaaccttaaagtctgctttaaggcaagggtttttttttaaaaccatttaaaatgaacctgatttataagctgagaaacagtcagcaattaatgcagaaactgtaatcatgctgcgatcccgggatgaaagttcttcttctcttgcccaaatgtcaccgaatagaacatcatcatgaagttcagcaaactttggcgcaaattctcctaattgttctcttccggcagtgtgtttatttgccattcaacaatccctccaactacactgtttttagtgcatggagaagtatagagtttaaagtgtgctttaaggcaagtcccgaatatataaacccagattcagcagctaaccacttgttttgagcttgacttaaagttaactttaagtgttaccttcacaacatacaggatagagaggtgaagatcatgaatattgctcaggtggcaaagcagtttggcctgacagccgcaacactccgatattacgaacgtgtaggattaatcccgcctgtaaaacgaaaaaacagcggcattcgcgactatgatgaagaagatatcaaatggattgaattcattaaatgcatgcgaaatgcgggactatcgatagaagcgctaattgaatatacaacattatttaccgaaggtgaccgtacagtagaagctcgaaaaaatatcctggctgacgaacgacagcggctgatagagaagcggaaagaaattgatgaaacaattaaaagattagacacaaaaattaaagattatgatgggaaattgcgcgaaaacgaggcaaaactcaaaagcaggcctaaaacggaaagtcttcacggatcagtggagcaaagaaggtagcattctttgcgtgtgaagagggcaggtcaaaaacgaaggattttgtttctggcctgttttctccatcaagagatcgcataaaaagaggtggttacgattccttatttggattggagaatttgcaaacattatcggagatcagatggagaaaagcggttaatctatttacggtcataggacccgaacaaacagtgctcattttgaagctgaggaacagttgtggccaatcaatactgttcctcagcaaatcagtcattgtatgttaaagggttggcaattgaatggctgtatcaatattttttaaattcagcttgacttgttcgtcagggttccaaggatggtaccagcctttttccatcatatagcttgagagttgttcgtgcatatcgagtgcttcttccaaatggcggataaggacctcttttacttcaggtgttccggcttcagtggctgccatcgcataatttctgactccgttctttgctgaaattaataagtccatagcaatgatttggtctgttagaacattcatgccagtcagatattctatgataggattcatgatttattcatctcctcattcgtgctttgcattagataaaatagaggcaaattcctgcaactggcgtgtggtgatatcaacatcttgctgcatgatttctttcagcttcggatcagataccagtgctttcattgttttagatttcgtcaaacaaagtgtcttaaatgcagtcatttcctgaacctcaagcacttcgtgtaaggcgtattccatttctgtaacctccgttttttaaggctttaacacaactttgatacaatcatccatttttgaatcaaaaatgtcatagccatgcttggcttcactaagcggcaggacatggctgacaacatctcccggatcaattttgcctgtcgatactagttcaaacatgtacggcatatagtggatcactggagcctgtccagagcgtatattgacgtttcgctgcataatatctcctaacggaaaaccgttatatctgcctccatacacacctgtaatttgtatggttcctcctttgcgaacagcttgggaagcaatgaccaatgcactcatcgttccgccatgaagctttaagccgctggcaaggaactcgagatcgctcattttaccatccatcccaacagcgtcaatgactacatccgctccgcctttcgtgatttcctttaaataattccctgtattctcatggtcttcaaaattaacgatttctactttgtttgtacgtttcgcatgctgtaagcgatagtttacatagtcaactgctatgacgcgttttgcgccttttagccaacaaaacttttgagcaaacaggccgactggtccgcagccgagaacgataactgtatcgcctttttttacgccggcattatccacactccaaaagccggtggtcatggcatcggcaatcacgcttaatttctcatcgggttcctcacaagattcagggattttaaaatgggtaaaattcgcaaacggcactcttaaatattcagcttgcccgcctggataaccgccagtttgccctgaatagccgaaataagcacccatttccccattgtcattagactgatcacattggctttccagttggtttttacaaaaaaaacattcaccgcatgctatattaaagggaataattacccgatctcccttttttagtttagtcacaccagaaccaacttcttcgacgattcccatcggttcatggccgatgacatagtcttcttgcatattcggaatgaatccatggattaaatgtaaatctgatccgcaaatggctgtactggtgactttgataatcatgtcatcggatttttcaatctttggatcggggacatctttgacaacaacatttttaatgccttgatacgttactgccttcatgctgtaaaacctccagtgttagtgttcatcaggtgtccggtcaaacatccctttgcgatttgtttcatcaggaaagaggttcatattgccgaccatgatcgtgttttttgcagagagctgatccagcttatactgttcgctcagctcatatggatggaaccactttttgctgatcatcagttccgtaatctcttggtgcatcgcaattccttgcatcagctgtttccgaagcagtgctcttacatctggtgaagcggtttctgtcaaagctacagcagtattccttacgccttccttagctcgtataagaaaatccatcgcgaatgtagtgtctgctagttcaggcacattcagcgaattaatggggtctaaatgatcattattcaaagaggcttaccttcctttcaattgatgattggcgttgggcggctttgagggacaggggcctgaaatgaggcacgctcataaaccgcttgtaattcagtaaggtcttgaatggattgctgtacatctttttccatcaagtccttcagttcttggtcaaacacaagcccttgcattaactttgatttcgctatacaaagtgttttaaagttcacgatttcatgtaagtcaacagcctcatgagctgccaatgtttgatgatccatattgatgtaacctccttttatcaacgttacatttcccgaaatgaagttgaagcatacagaaaatacactcggtatcattttttgttttaagaatcgctgtttttgctcgttcttatgacatggactaaactgcacttaaatcagatataagggtgaagtgtggaaatttatttatggaaacttgacatagggctgtcaggtttctttggtatcattaaattggatgaccagtaaaagtatggttttataggaggcactcgatatgaagctgttacaaattagactgttggtgaatgattttaagaaaagcgtcgagttttataaagattcattaggacttccaataagttggttagagaatgaaatggaatatgcactctttgataatggggaaacgaaaatagagcttttatctcgagaaacgatggctgaaatcgttggagaggaaaaaaagtccttggaaggagaagctcaatcaaaatttttgcttcagtttaaggtagaagatgttgataaaacgtatgacgatttacacgaaaaaggagttaaatgtgagaataaaccgcatgatcgcaaggaatggagtgcccgagttgctcacttcagagatccagatcataatctgattgaaatatataaaatgttatgatttttcgactcgcaaaatcatagaataacgtttgataacgtacctaatcatttttatacgccctggtaaaagaaagcaaagtcataataggttgcggacactgaacttgcagcatttacgctgctttgtatggtgtccgtttttgattggtgaaaaaggtggagtatctatgaatcgagaagaagcgtggatacaaggaagcagtacactgattgagttaattggtggaaacgaagccgcttgatccatgtcctttttcctgattgtcaatcgtgattaccgactggacaaatgattaagagccaaatgtaacacaccatcaatatcaagtctgactaccatttattttgtatccttaattgtcgaaaacataggaataattccacttttgaaagatctagtttatggtacattgataaatatatgggaggggagggggcatggtatctgaaagtaaatccttaactggatgtaagaaagtcaaacgtacggcatttataaggggagggtataaggtgaataagttaaagaggctaagtatgctaacggtgatgattgcatctgtgttcattttttctagccatgcacttgcggctcagtattatacggtttcaacaagcagcggtgctcctgtcaacatgcgcagcggcccaggtacaagttggggaattgtaacgaccattccgagcggaacccgcatcccgatctattgctacaaaaccggtacaactgtaactggaaagtatggaacgagcaatatttggaattacacagagcggacgcttgccagcggggagatcgttcctggatttgtctctgatacatatatgtatacaggctcagacggtccggttgttcctaaatgcagctggtagcatatgttctatcgtttcttaaaatgaaggaattgaagaaagagggatgacattgactaaactgaaaatgctgagtatgttaaccgttatgattgcatcattattcattttttccagtcaggcacttgccgttcagtactttactgtctcaacaagcagcggtgcgcctgtcaatatgcgcagcggtcctggtacaaattatcctattatgctttccattccgagcggctcccgtgttccttattattgttatgcttatggaacgactgttacagggaagtatggaacgagtaatatctgggaccaaatccagtggaaagattcccggggtgtcgtgaatattggatatgtgtctgacacatatgtgtacacaggatcagacggccctgtcggttacaaatgcaattagctaaatactccgtacaatagaatctcttcttaagggcctatctaggacgaaccataccaacaacaatagttggtatggtttttgttgcgatgaagtcttccatacctgcatttgtggtgattttcaaaagagattcatggtgttagacactggttgttgttgaggacaaaataacgagccgctttagagttgtatctaatggtataaatacggaattaagataggaaataatcaataggagaacgtaatgtacaaacctatttttcgatgaaattcctaatatcactttggttagacatctcacattgcattctcgttagtgaaaagttctttttacgcttcgtgaaatcttctccaattccatagttagttttatctgtcctattatgaaaattttaatcaatccttaacacgtatgtttcttttctttttctaacatgtcgtgtaacctctcagaaaattctttatggtacattgtgtaccccgtatgatttccggggaattcaaccaattctgtttccaattgttccgctagggcgttcgcgcaacgataaggaaaaagctcccgagaagcacttccgccagctgggagtaccttcatcggtgaagatgtaaacacagtttttaatgcttcgatatctaatgtatagttgagaattccttgaatttcatactcagtgaaatacgttgaattgccgagaagccgctttgtcagcacagcatttgattgttcgtctgtctctaatcttgacattaacttaatgacttcacttcgatgatttttcttaaggtcttccataaattgctcggcttgtttcagctcatttccatgcagaagctgcaataagattggttcgtgtgggatcatgacatgtacttgttcgggatggcgtatgcacagatcaagcccgataacagccccggagctgcttccaaatacgtatgccggcttattggtgattttggctagaagacggtgagcatcgtcactgtgtgtttccacacggtaatcctcaatctgattggcgagattgctgcgggaatggccgcggcgatcataagtaacaaccgtgtacctgttagccagatgattggcaatatgatggaacttgtcggcatcaccgcctccgccgtggaccaaaagaatgatgggacctgagccacgcactttatagtggatgttcgctccaggtacttgcaatgttccattgtttatcgtcatttgtaggaccttcctttcttctcatctcctttaactttacacaattggccaaaatgttcatatgcaggaaataactaagaaacaaactcgccataaaaaaagcactgattatatttcatcagtgcttccgttttgtttatttagagtagacaattttttttattgtttcaatagagaggtgatattcatcagataaattatgaatggttttgccgtttttaaatgcttttttaatagaagcgtttctgtcatcgatcagctttcttgttcctgaacacgcaccccatttttgatgagaggattcaggtttagggatatatattgtttttccttgaacatacttttgaatttccgatatcagcttttcaggtaaaatagcggttgcttttacatatgccatttctgccagctccttattttttatgttaaataaggtgcaaagccactatatcagaaaagcttactagggcgatcttttagaaagtctaccccatacaaagtatcgccttcccaataataggctttgcatgggacgttgcggaatctggcattctcatcttgcttgccatttacatcacctccctaacgattttcgatgatcacttccattaaaaaatagagtaaagccttatggcatcttgttaatgaaagttgaagcagtatgaaaatcaagggaccttcccagtgagaggggctaaggctgattggcaatgaaaagagtaagattcaagctatattactttagattcaaaatattgacaaattgatgtattttcaacaatagggcagtctcttcatgtatactgagtctgtatttacaatatttagaaaggggaagtgcaatgaaaatcagtatgcaaaaagcagcgatctcattacttgttttcactatgttttttaccctgatgatgagtgaaacggtttttgcggcgggactgaataaagatcaaaaacgccgggcggaacagctgacaagtatctttgaaaacggcacaacggagatccaatatggatatgtagagcgattggatgacgggcgaggttatacatgcggacgggcaggctttacaacggctaccggggatgcattggaagtagtggaagtatacacaaaggcagttccgaataacaaactgaaaaagtatctgcctgaattgcgccgtctggccaaggaagaaagcgatgatacaagcaatctcaagggattcgcttctgcctggaagtcgcttgcaaatgataaggaatttcgcgccgctcaagacaaagtaaatgaccatttgtattatcagcctgctatgaaacgatcggacaatgccggactaaaaacagcattggctagagctgtgatgtacgatacggttattcaacatggcgatggtgatgaccctgactctttttatgccttgattaaacgtacgaacaaaaaagcgggcggatcacctaaagacggaatagacgagaagaagtggttaaataaattcttggacgtacgctatgacgatctgatgaatccggccaatcatgacacccgtgacgaatggagagaatcagttgcccgtgtggacgtgcttcgatctatcgccaaggagaacaactacaatttaaacggaccgattcatgttcgttcaaacgagtacggtaatttcgtaatcaaataagcagtaaggaaaagaaaccgctgcagattgaactcaatctaaaagataccaatgatgtatgttggtatctttttatttgcagtaaaaagtattcaattctctataatgattaggtcgggcttgaggcagataccttaaaggacattggcgatttcatgtaaaacaataacaatatagaggctttttttaaagccatgccggattacaatggatctgtgcaagaaggcgccttcaatccatctattaacgatggaaagggagaggctttttgcacagtccatctacatcatttgatagtctccatgcgtataaactgttccgtccataatacgtcgtgcggtacggacgatctttataccagtgggctccaccattgtttcaataataccagaagaatgagctagccgaacctttgtagagtggttttttgctattcttgcagggattgcaccttccactgaaagggctcttgttgtacatatcgctccagtgacagccagtgcttgatgtggcttttgcatggacatcatcctgatgtgtaagtccatctcaacgtttgaatgccaagcacctgtactatccttatatttctctggttttgatactatagccagtttggggacagccggcgataactttgtagctgaaaatcgactggcaaagccgcatttctctgccgcaatggatcttaattcttcaaattgagccaactgtagatcagtaaattcttctgcaagttccgttccatccaggccgatactgctcgcttccacaaaaactaatggatttgcatagtcgataatagacacctctatttggccttgacttgtatctaaaaactccgaactatttccagtaggcaataaatgaccggtaactgaaccagcggcatcatgaaagtttaaatagattggagatccagatccaggtactccagatatcgtaacatctccgtcatatttgacctgaccgtcttccacttgcacttccgcaatgatcattttattcgtattggtattcaggatccttaccgcagtcattggttctgtcgcttttacaagtccttcttcgatagcaaatggcccaacagcagcggagatatttccgcagttccccttaaagtccactttttcttctgaaatgctgacttgaccgaaagtatagtgaacatcaatatccgaggtatgtgctttcttgattatcgccactttgctagtaagagaattgccgccacccaaaccatctatttgtcttttatcaggacttcccatgatatcaagcaaaaagggctcccattcgtttttattgttaggcatggctgattcatggaaaaaaattcccttgcttgttccgcctctcatgattgttacattcgtcttgaccatcgtcatcatcctcatctgaaaggtagtgttttatgtttttcagtgtagaaggtaaaaaaataaaaataaaatataagttttcttaatattcaataaaaaaacttttataattgtcaaaaaaggactagaaaggaagatgaaaatggatgagaaagattggattttattgaaaattcttcgcgaagaacaaagtgtaacaaaaacagcagaacgattatttacatcacagccttccatcacttatcggttgaataagattgaggagattttcggaattgaattattcaccaaaaggcataaaggaattacctttactgcggaaggagaacacttggttgcttatgcaagaagaatgctacaggaacttcaagataccaaagatcatatttctaatctaagcaaagaggtgcaaggacatctaaggctgggggtatcaagcaatttcgctcaatataagctccctaagttattaagggaattttccactatgtatcctaatgtccaatatagtgtacaaacaggctggagcacagatgtcatgaaattattagatgctggtattgtacaagtcggtatactgagaggaagccatcgctggaaaggggtggaggaacggctgacacgggaaaaattacatatcatctcaaaaaaaccaataacgatagagcagcttccttttttaccttttatcaaatataaaactgatgcttctttaaaaacgattatagaagattggatgcatacgaatctaaaacaagcccccattattgcaatggaagtggatcgacaagagacttgcaaagagatggtaaagcatggtcttggttactccatagcaccagaaatttgcctgcaggaatctgatcatttgtacacaatggaactgtataatgctaagggtaagcctctaatgagagatacttggctaatgtacgatcaaaaatcattaggaatcaaactcgttaaagcattcattgattttttaaagggtgaacaaatggtaaccatttaaagttatgatagaattttttttggaacacagtaaaaaaatatttatttaacttattacaccgtataagatatgttaatcaaaagtcatttgaaagcgtattcttggaggtgtaatatgcttactattttaggtttttcgatggtaactgtttttacaatattaataatgacaaagaaagtctcgccaattgttgccttgaccatcactcccattgtttttgctcttattggaggttttggtaaggatattggcgacatgattttagaaggaattcaaacagttgcaagttcagcggcattgctattgtttgctattctttttttcggaattttaattgatgcaggtttatttgatccgctaatagaaaaaattttatctatagtaaagggagaccctgtgaaaatagcgatagggtctgccgtcttggcaatgcttatcgctttagatggggacggtacaacaacctatatgataacagtctcagcaatgttacctttgtataaaagaattggtatgaatcccatggttatggcgacattagcaatgctgtcgttgagtatcgttagcggaatgactccatggggcggaccagctacaagagcgatttcagtgctgggtttggatccttcagatttctttgtgccattacttccgaccatgcttggaggtattgcttgtgtgatatttctggcttttctaatgggaaggaaagagaggaatcgaataggcatcgttcaattagagcctagacatataacaaaggacagctctcaatcttatatggctgctactttggagagcgaacaattgaaaaggccacgcttaatatatcttaatttattcctcgttataagtatcatggtgtttattgtgcttggaactaagcatccgtcagttttatttttaattggttttgttcttgcccttactataaattatccgaatgtaaaaatgcagaaggagcgaatcgccgagcattctggtaatgccataaccgtggtattattggtattttcagcaggagtatttgctggtatattatccgggacaaagatggtggatgccatagcaggatcattggtatccatcatcccctcatcaatgggagagtttttccccattattgtagcactcactagcattccgtttacttttgttttatcaaatgatgcatattactttggtatggtacctatctttgcagaagctgcctcagcatatggtatagaaccagtagaaatagcaagggcttctataatggggcagccggttcatctgatgagtccattagttgcgtcaacactactgttagtaagcatgcttaaaattgacttgggatcatttcaaaggtttgccgttaagtgggctgtaattacatcattagttattacgttgttagcaataattacaggggctattactattttttaaagaaacaataataatatttagactgccaatgaatcattagtttgattgatttaaatacagctgaaaggggtcccaagctgatcaagtcagttgtctttccagtactctattgtttagggttcttttttagaagcggcagcgtttttgtcgatgtttagccagcattttcagcatgatgtggaaaagacaagagacaaacaagctcttgtctttcctaatatgatagttcagtataaatatttaagaaaaatgtcagtattgagtaatgaatgtatcaccaggcgtatgcctcaggtgtctctcctccaggtccgggaaagatatcatttaacatgcggagaatctccttatccagactgatttcaacggcttttatcgtatcacgcagctgctcaaccgttcgtggtccgatgatcggcgcagttaaaactggatttgccagcacccatgccaaagccacatttgcttctttttctcctagttctttgcataaatctgaaaatttctcgagttgcaaacgatgttttttaattaaatctgctctttttgctgtacgaattccggcattgcttttcaatgccttcccgccaagaagccctcctgcaaggggactccacgccactactcctaaaccaagatcccgtgcagccggcagcacttccatctcagctgttcgttctaataaactatacttatgctgttcagtgacaagtcccatgaatcgtcgtttttcagcttcagcttgcgctttaactaaatgccagcctgcaaaattactggatccaatatagtctactttgccggagcgaacctgagtctcaaaagcttcccatatctcatcccacggtgtccgcctatcgatatgatgcatttggtacaattcgatatgatctgtctgaagccgcttcagtgatccttccagatgacgtctgattttgtatagagacaagcccctcatatcatttggtccgtcattcggatcagaaatcggttcatatacttttgtcgccagaacaactttctcgcggcgctgtcctccttgtgcaaaccattttccaatgatgctctctgtcaatcctgcgtttttgccccagccgtaaatattggcagtatcaaaaaattgaatgccgttatcaagcgcttcatccatgatacggaacgcagtcttttcgtctgtatcaactccaaaattcatcgtgcctaaacataaacggctcacccgcaatcctgttctccctaaataggtatactccacaacaaacctctcctttatcattattttttgcaacagctgcaatacaattgattcaacaattgtttcgctctttgttacgattaaaaagacgaagcaaatgtaaagcagacgcaaaattataggaggttttttcaaatgaatatagaggatctatgggatcaatttcatcagccgttaaaaacatatatttcacatagggttaacgatcaatctatcgttgatgacctcttgcaaatcgtatttatgaaaatacaagtgcatctcccaaatctgatcaatgaacaaaagatcgacagctggatttatcggatcactagaaatacgattattgatttttaccgtacaaaaaaaacaagcgaaatattgcctgatgttctacattttaatgacagtgcagaggaagaaaatttcaccaaggaagcaactgtgtgtattcgatcgaccatcaaacggttgcctgaaaagtatcgagaggctctcgagttaactgaattccaggggttatcacaaaaagagttgagtgaaaagctcggcatttcttactcgggagcaaaatcaagggtacaacgcggacggagaaaattaaaacagctgcttgaggggtgctgtcatattgaagcggatcgatatggaaatatcgtagactttcgtattttaaaggaataactgatgaacaaagtcagttattcctttaaaataggccatccgcatgaagagcattttccctttgatgtttgtaagagatgtatgtataatataaatcgtaacgttttcgatttaataaaaaaggagtgttggaatgaacattttattttcaaagccgctaggcatattaacgattggttcattactagttttggcaggatgtcagacttccggttcttctgcaggtgagtctaataaaacaacatcatcctcctcagcagttgaagaagactcttccaaaacgcaagagcaaacatctgacagtcatacacacgaacattctcacgatcatagtcatgcgcatgataaagaaacagaaaaaatatatgaaggctattttaaaaacagccaagtaaaggatcgcttactttctgattgggaaggagattggcaatctgtatatccatacctgcaagatggtactcttgacgaagtgttttcatataaatcagaacacgaaggcggcaagacagctgaagaatataaagagtattataaaaagggctatcaaacagatgttgaccgtattgtaatccagaaagatactgtaacgttcttcaaaaatggacaagaatattctggtaagtatacgtatgacggatacgaaattctaacctatgatgcgggcaatagaggggtaagatacatattcaaactagctaaaaaagcagaagggctgcctcagtatattcagtttagtgatcatagtatttacccgactaaagctagtcattaccatctctattggggggacgaccgtgaagctttacttgatgaagtcaaaaactggcctacctactacccgtcaaaaatggatggacacgatattgcccatgagatgatggctcattaaatgatgattactctatgaaagtttttctgccatagccatttttttctgtggagaattgatagaatggggaaaaaactgattgagaccactcaggatccgccacattattgtgacgtggcataccttgagtcatctcacaggaagagtagaagaaacctatttcaaaataaaaaatcattggatgtatggcagtggattacgcttgaaatctattggcttatatgaagcaaagaagagacccaaagaccgcaaagcttcttcaagaaagctttgcggttttttatatgtctaagcctcgattcatctcaccataaaaaggtatttcaactttctcttttgatcgacaatagtccataaagggaagaatatttccctcacaaagaagtcgtggcagtaatctccataggtgtgtttgcatggccccactttaatggttttgtttaaatctaataaaaaacagacgccataaagatttcttatggcgtctgatggatatgaggtaaggtgtgttcttaatagccaccaaagaaagatgtcccaacgatgattaataggatgaatagaactacaattaatggaaatgacctcataacatcaccttccttaaaagaggatagtacatgatatgcagatcgagcttattcgatagtgatgctagtttaattgatgtaaaaatatttttaaggctggactgctaactgatctttattagttattggatcatacttattattttggaatgaatccgtttcaaagtgatgtgttgttctcggccaatcgctggttaatcttcctggtgcaatcaagctatatgaagacccctcttttatgaaagtacacccaaaacttctctctcttgcagacccttaatcatttgacttgcatatcgagcgtaagcatgcctcatctaaaaataaagtgcaccatctgctatttgttttaacatttttaagacagtgatgcacaccttttgcgttgagcaaatggaacaggctcagaaggggcgagctgctccttacttcacccagataaaagacggggatagacggcatgcaccgaagctaactgaaagttaaattgaaatgaaaaaaggggcatgttaagccccctttaagactatcgagagcttctcaatagcctaacgcattgtatgtttaacatgttttaatttttcacaacggataaactgacactgttgcctgagactgttactttagcgaagtcttgtgtatcaattacaggtgttattgctttgttgtcgatggtgatgtttgtaaaagatgttgaaaaatttgatttgatagattggcgtgaacctgttgtagcaactgtagcaagcgctttccatttggagatggagccgacatttgttttgctgatttctgaaatgagacggccgttgtatcccgcattgttcgtgccccagtatgtagcgcgggtattgccgttaaggtttttgtagattgtaagttgtacggtgctgccgggacggaagcctttcgtattcgtgaattggcttcctccttcgaggtactgaacctgatcctgtccttttgaaccgactttcatatatggtttccatacattatatttatcactgtactgaagcccgatatcggattctgtgcccccgctaaagccagagtagatgtaggctgtcccatttgaaacctgaatggagctaggaagctggattttcgtaacaaaaatggcaccagtgctgttcaagtaagcccttccgccgattccatcagttagctgtgatgcagcttctgcggtttttggactaataatacccggcacatctactgcacatgtgccaaaaagcacagttgccgtaagcgcacccgcgagcagtccttttttcatcatcattatttcccccctatcattataattagaaaacgctatcatcttgtattataaaacattatgaaaataattccataataaacatgcgaatagacacagaatttacacattatgactttgtgtatctggcaaacggtcgatttctaatctcgaaaaatgtcctgtgaagtgtaaatgttacgataacttttcaatcgagacttgtgttttattgaaatagaaaagctatagagatggggtagaaataagaggggaaagagcgaaaacactgtaatcagatatgtgtgtataactcaattgtttgttagaaaaaaagtgggctttttaagcccgcttcttagttcatgtttctcttcaggagattgtctttttcatttacattcaatgtctaacatgactcctttgagtttcatctaatatttcaaacaatcttttgtactttgatatgatttcttggtccacaattttgtggccagaatcgaaaaaggtgattgagcccgatcctttaccaagctgattacgatctgcaagaacttttttcaactgttttgcagtaccgacactgcctgaaatcatatcaacttttatcccaaacagtttttcaaaactgtttttgaaaaacggaaaatgagtgcatcctaacacaatcgttccatattgtttcagatcaaaagaagatagttcgttctttagatatttaatgattttgtcttcactaaaatcaaagttctcagcaaattcaactagtcctggaagagctaagcaatcaacaaggtcatggtgatcaatttctttaactagattatgaaatttctcttctttaagcgtcaaattagtagcaactaccagaactctttttctttcctctgtacatttatttatagcaggctttacagcgggttcgattccgattatcggaaagtcgaagtttctccgaagatcttctatcgcaatgctagtagctgtattacacgcaataacaagagctttgatattttgactggctagaaattcagctgcattgaaaatatattctttaactctaccctttgatttttcaccgtatggaacgtttaacgtatctgcataaaaaatgtaatcttcataaggaagaacttttatggcctcatacaatacagtcatgccaccaattcctgaatcaaaaaatcctattttcatcacttctcacgctttctgtctcattctttttttatcatatgactttatatcatctgaatcaaacgaaaaacaaccattttactattcgaatttaatatgggagttatcgatttttcgaatagatagcaaaatttgagaaggggagataagatcgaaatgttggtgatgtattgtggttgtggtgaaatcattaagatcgcatcgtatcaatgggatgattggtaacccgattcaattagctttgaaaatgtaggagtatttagatttccagagtcaggggatgaaattacgaaaaaaaagcaaactgcctgtcgaagtttgctttttgctctatcaatgaggtgcgcctatatttttatatcttcttggcaaagctgatttaaaagctgcttaaccgaaatttcctcagtcaatgaccgtatcccttgacctgcccataaagacatctgatcatggttattttgaagtgaagcctgctgtctcattgccttcgttagtgtattttgataagggtacggaagggtttgtgtctcaaactgttctttttcttccatccatttatttacgattcctctggcctctttacctgaaaataatgtcgtaagctttgtatctgcttcgtttgcttctagtattttctgtttatgtactggatgtgcgttactctcgtgacaaattaaaaaggcagaaccgatttgaacgccttgggctccaagggttaaagctgcttttactcctctatggtctatcattcccccagcagctatgacaggtacgctcagtgcatctgctgcttgtggaatcagagccattaaacctacggcagattcacctttggaaggtaagaatgctccgcgatgtccaccggcttcacttccttgaaggactactatatccattccccgttcttccattaacaatgcttcttctactgttgaagcggttcctattaaacagcatccagcggtttttagctcctttactgcgtcttcaggcggcagatcaaaagtgaatgagcaagccttaaccttatattttaaaattagatcaattttttgatagaagtcatcccactcttcttgtacagatgtgaattgatttacttgattagctaacggtatgttttctttccactttttaatctgatcttctggtggcatctctagacctagcggaacaaacacattaatttgaaaaggagcgtctgtcagctcaaacatttcttttatctgttgttctagcaggtctggcgtaagataccccgatgctaagctgccaagagcaccttgattcgaaactgcagatgcaagtcggggcgttgtaataccgccagccattggagcttgaataatcggttttgttaaggaaaacttcttcataaattcattcataccgaatccccccgttaagacatgatttttgaaaaaagtgtcattttaaaatttgctcaaaaactcgtattcgcttaaatatatcgttttccttctttttgtcaatctctcataccagttaacatgtcgataaagcaggggggattaaagtgtgtcaaagatagtgtcgtcccatggcggctctacaaaaaactgaatattcatgtagtccttcatagttgatatctgattttgagatgtcttgcatcttaattttgaatgatatatagaaggacttcatgtaaaataaagcttagaagaatacatcacattcaagagtaaaaaaatctataagacgtacagatcaatattcggttttacagttagatattaaggctgaaacggaggaacatgcgatgcgaagtgagcaggaaatgatggacattttcttggactttgctttgaacgatgagagaatccgattggtcactttggaagggtcacgtacaaacagaaatatccctcctgacaacttccaagattatgacatctcgtattttgtaactgatgtagaatcttttaaagaaaatgatcagtggctcgaaatctttgggaagcgcattatgatgcaaaaaccagaagatatggagctttttcctcccgaattaggtaattggttttcatacatcattctttttgaggatggcaacaaattagatctaacccttattccaattcgtgaagcagaagattattttgctaataacgatggtttggttaaggtcttgctcgataaggattcgttcatcaactataaagtgaccccaaatgatcgccaatactggatgaaaaagccgactgcaagggaatttgatgattgctgtaatgagttctggatggtttcgacttacgtagtaaaaggactagcaagaaatgaaatcctttttgccattgaccatttaaatgaaattgtacgtcctaatttattgagaatgatggcctggcatatcgcatctcagaaagggtattcatttagtatggggaagaactataaatttatgaagcggtacctttcaaataaagaatgggaggaactcatgtctacatattctgtgaatgggtatcaggaaatgtggaagtctttatttacttgctatgcattatttagaaagtattcaaaagctgtatcagaaagtcttgcatatcagtatcctgattacgatgaaggcatcactaagtatacggaaggtatttattgctcagtaaagtgataagaatataggattgtcttcatatgatatttgattctcgctgacaatggagaccaaggagtcaccatgtttgtaaaaagatgcgtaaatcgttatgtttaagaatgtctacgcattttactataattattcttgtccaaaattttttgttctttttaacgaaacgaggcattataattaacctataggcacattgaaaaaacaaaaaggaggatttttgtgtttcaaaccttagaccattttttgaaatcttgggagttcgaagcagatgctacacagaaactattaaataatctgactgatgaatcacttaaacaagaaataacttcacaaaattggactctaggccgtattgcttggcatactgttgctgccattcgcatcattacctcaaacacagacttaacgttccatgccccagctgaagattatcctgttccaacttcggctcagtttatagctgacagctatcatcaagccagtaatgcatttgtacaggcattaaaaacccaatggactgaccatacacttcaagaacgtatcaactttatcggacaacaattgcctaacggttcacttttgatgtttttaattcaacatcaaaaccaccatcggggacaaatgactgttcttatgagacaagcaggtttaactgttccaggtatttatggtccagcaaaagaagaatgggcaaaatttggtttggaagccccgaaaatgtaatcaacctttttataaaaagttacgctatgacaacatataagaagatgttttgatcaatcttttttcaaaacatgttctttttttgttcgtttaccaatgataagaacatattcgaatcatttttattccaaaccacttcaaatgacaacgttcttccgctttattgttggcctattcccaacgatgtaagtataatttttaatgctgtcaaatcttctagatacacatatctatagattcctctctaacaaaaccccgctttttctgccatcactcgaggtgggtaaggcatttcatttttcaaccaccattcgactactcctacgtatgcatttgcaacaaattcagcagcgatctatggttcagaaattccaatcaaacattcaggtattgctcaatttcgactagaagcagctgcgccaaaaggaagcctattggaagagtctagctaagttgcaacaaatggatacaagaggggaacgttttctcaaaagggaaggtagtgtattactgtaattcatacaatgagtaaagcctcccaggtataatctttacttcgttcgacaaattctgcaaattgtagacaacttcctgattatttggataattaactggataggaggggaaaagttgtcatatttcattatacttatcatcgttctattaatcggagcattggtaatagcagcagtcggtatcgcctcttcaaaagtagaggtaatctcgccgaaaactacaatagaatctaaagaggaagaacagaaaagtttttatacgttgaaataaagcagagaaagagcatctcctgcgggggtgttttttatagaggagttggaaaaactgaatcagactaatttacttttaagattcacccttgaaattgctgcactaatctccttaggcgtgtttgcttggataagctttaatggttattttaaatatgttttaactttggttttacctattgcagttatgattgtctggtctgtatttgcagtacctcatgatcctagtcgaagcggacaaactgtaatagctgtaaacggggtaacaaggttagttattgaattattgatctttgcaatggctgttgcagcgctttattttagtcatttaaaaccagttggtattgtctttttatgtctaataatactccactacatcttttcagctgagcgtatcaaatggcttctaaatcaatagtttttaatttcagcactcgttattagagtgttttttattattctctgtagagccagtgattctgagattagatttgaaggttaacggcttgggcacagttgcagtatagaacgcattttccaataaagaaggcgctcatttgaaattcatcattaaacaattgtgcaaaagtaaaatttgtatttagaatgtagtaataaatagaaattctacataggagggtatcttgtggaagaaaagaaaaaagctttaatcattgtggatgtacaaaaagccttcgatgataaaaaatggggggaacggaataacgtaaaggcggaagaaaacattagtaaaatactaaaattatggagagaaaaaggatggacagtcatatacatacaacacacttctgataaacctcattctttattccatccaaagaatgaagggtttgcgataaaggaaatagttaagcctatggatgaagaagtcattataaccaagacagtaaatagcagctttattggtacgaatttagaagaattcttaaaattaaatgaaataaccactgtagtcataactggtttaaccacgcctcactgtgtatcaaccaccacaagaatgagtggtaatttagggtttgatacatacctgatttcagatgcaacagcagccttcggaatgagagaccaaaatgatacatattatgatgcggcgactattcataatatatctctagctacattgcatgatgaatttgccacaatattgacaactgatcaattaataaatgattttataaaaactcactgatgaaaaacattttggcacagtaaaacggcaggcgcctttccaataggaagggcgctttaattcgatttcctgctttactgctcagaggagatgtatcaatgtttctttatcgacaagcaagggcagatgaatgaagcaaagtggcaaagctcttttatggatttactcgtaaaacgcgaaaaaaaagatcattcatttatttttgaaatgcataaagtactgacaagagcatattttaaaaagcatttcttttttgttgacattcagaatggtgaaatggttgttgccgctctattaaaacatcgtgataaacccgacattaacttgatcgattatatagcagcaggggggataacattaatcaaaatggggggattttcagtattgaacatgttggcggtgactaatgagactgaaaaatcttccaaatccttataagagccggcatggtatttagaagtattaggagtttcgccattttatcagggaaagagtttgggcagcaaaatgattaatgactgactcataccttttatttcaaaatgcggggcggcatcttggcccttatcacgaatgctgatctcaatagatcattttacaaatcgtattgattttatatttaaagattatcttaacctttcataaagatggaggtcgaatgaatgtcttcaaaagaaaaaaatagtgtaaccattttgacggaaagtcaattgtcttcgagagcatttaaagatgaagcgtatgaattttataaagaattgcgaaaatcacagcctctctacccattatctttaggagctctggggaaaggctggctcatatcgagatatgaagatgcaatacatttattaaagaatgaaaaattaaagaaaaactatgaaaatgtatttaccgcaaaagaaaaacgtcctgctctattgaagaatgaagagtctttaacaaagcatatgcttaattcagatccccctgatcacaaccgcttgcgaactcttgttcaaaaagcatttacgcatcggatgattttccagttggaagacaaaatccagcatatcgcagattctttattggataaagtgcagcccaacaaattcatgaacctagtagacgattatgcgtttccattgccgattatcgtgataagtgaaatgctcggcattcccttggaagatcgtcaaaaattcagagtgtggtcgcaagcaattattgatttttcagatgcccctgaaagacttcaggagaatgaccacttgttaggggagtttgttgaatatctggaatccttagttcgcaaaaaaaggagagaacctgcaggagatttaatcagtgcattaattcaagcggaaagtgaaggcacacaattaagtacagaagaattgtactcgatgattatgctgcttatcgttgcaggtcatgaaacaaccgtaaacttaatcaccaatatgacatatgctctgatgtgtcacggtgatcaatttgaaaagctccgccagcagccagacttgatgaattcagccatagaagaagcattgcggtttcacagccctgttgagctaacgacaattcgctggacggctgaaccgtttatactgcatggacaggagattaaacggaaagatgtgatcatcatttctttagcatcagcaaaccgtgatgagaagatatttccaaatgccgacatatttgatattgaaagaaagaacaaccgccatattgcttttggccatggcaatcatttttgtcttggtgcacagttagcccgcttagaagccaagattgcgatttccaccttattacgccgctgtccaaatatacagttaaaaggcgaaaaggaacaaatgaaatggaaagggaattttctgatgagagcactcgaagaattgccgcttagtttttaattttttggggatatgtgattttcaaacatactcgttttactcctcaattagattaaacgatagtaaagctgtaacataaaaatttgatatgatagcttttcaaaaacaaagtttagcattatttatgcctaccgggcatgaaaatatcttgcaaacaccaatagtttccccctatcggtgttttttatttgttttcagcctcatttggacaaacagctgttacatagtaaacgtttgttaagataaaataatggagggcattgtttctaatgagaaaaataatgatagatggaagagactttgaaaatatagaagttttacatgatgttttaaaagataaattagacttcccaaactactatgggagaaatttagacgctttatgggattgcctgacagggtgggtggatttgccgctcactttagtcttgataaattttgagtttagtaaaaagtttttaggttcatacgctgatgatgtattagaagttttactagaggctcaagaggaattagaggacgagtttaaaataataatagagtagactttctgttttgtgaattttaacagttttcgttcgcagaaaaaggcaatagggcaccacaaattaaaatttcgttgagaccgcaataactttttggcttctgataagtttcttatgatgttggtatcaagtcacacaagtcccatgactactttctgatgtaagttaatttcattatgagttaatcatgaggataattttattctgttaataatattttaaaaggatttaaatttaaataatattttattaacgaataaaaattcgttattatttaaattggatgaaatataattctgttaagctgtattgggggttatcaaatgagtattatgcttgacgaaactgataaggccattttaagagaattgcaggaagatgcttcaatatcaaatttaaatttatctaagaaaattgggctttcaccatcagcttgccttgcaagaacaaagaacctagtagaagcaggtataattaaaaagtttacgactattgttgatgagaaaaaacttggaatcgaagtcacagcactagctctcatcaacttatcacccttaaatagggagacaattcattcatttttagaggatataaacaaattcccacaggttcaagaatgctacacacttacaggaagccatgactatatgcttaagattgtggcgaaggacatggagagttatcggaattttatcattgattcattaatgcagaaccctgctattagtggagttgacacaagcatagtcatgagtacagaaaaaagaactgtcagtgtgccaattgatgaaatgtaggaggttgttgatttgaataaaaataaagaatcgttacatttaagctctcctgctataaacactcatatgaataagagaggtcaaatatgggctgcatttcgttctgcattcccatatacaattccgatttttgcggggtttttatttttggggatagcttatggaatctttatgcattctttgggatttagcgcaatctatccaatcatcatgagttttatgatatttgcgggctcaatggagtttgttgcagcgaattttttacttggtgcgttcaaccctatgaatgctctttttttgacgttaatggtcaatgcccggcatttgttttatggaatttccatgttggataagtacagagggactggaaagaaaaagttttatctgattttcggaatgtgcgatgaatcattttctattaattacaccgctaatgttccggcgaatgttgacaagggctggtttatgttttttgtgacactgcttaaccatttatattgggtcgcgggggcagcgataggaggtatttttgggtcgtacgtgaagtttaataccgaagggcttgattttgtgatgactgctctgtttattgtgatattcatagaacaatggatgaaagaaaaaaagcattacagtgctctcacaggacttggactttcagtagcctgtcttatcctttttggcggaaaccaatttattattcctgctatgctcgccattttaggggtactgactgttctgagaaaaccattggagaaagctgaggtttccgtatgacgatgacgatgacgcagcaaatgatcaccattgcaatggtcgtgcttggaacaatgctgacacggttccttccattcatgattttcccgtctggcaaaccgacaccgaaatatgtacagtatcttggtaaagtgctgccatcagcggtaatcgggcttttggtcatttattgtttaaaagatgtgagtctgctttctggaagtcatggcattcctgaattggttggggcagctgcagttgtactgcttcacttgtggaagaaaaatatgcttctttccatagcggggggaaccgttgtttatatggttttggtgcaattggttttttaaccgatatcggaaacgatcaaaatgatcatgtttttattgaacttgataaaaatatataaaactgacacaaacttattttggaatcaacactgcgccagtgcaaatagcatctgtaatgtttcctggctattcaagaagtgtctactttaatcggaggatatataatgtcaaaaaaagtgtctgcttcctatatcatcattataggattaatgctatttgcattgttttttggagcaggaaatctcatttttccgcctatgcttggtcaaatggctggaaaaaatgtatggatcgctaatgcaggtttcttagtgaccggagttggattgccattactggctataacagcatttgttttttcgggtaaacaaaacttacagtcgttagtcagccgtgttcacccggtgtttggcattgtatttacgacgattctctatttggcaatcgggccttttttcgctatcccgagatcaggaaacgtatcgtttgaaattggggtaaaaccttttttatcaaatgatgcaggccctgtctcattgatcatatttacaatattatttttcggattggcatgcttgttatcacttaatccttcaaaaatcattgatatagttggaaaatttttgacgccaattaagctgacatttatcggattgcttgtagtggtagctcttattcgcccaattggaaccattcaagcaccatcaaaagggtacacatcacaagcgttttttaaaggatttcaggaaggatacctcactctggatgctcttgtagcatttgtttttggaattatcatcgtgaatgcattgaaagaacaaggagcttttaccaaaaaacagctgatgggtgtttgtgcaaaagcagccgcgattgcagctgtactcttagcagttatgtatacagccctttcctatatgggggcttccagcgttgaagaactggggattttagaaaatggagcagaggtcttggctaaggtttcatcctattattttggatcttatggttcaatcttattgggcttaatgattacagtggcgtgtctgacgacaagtgtcggactgatcacagcgtgttcttcattttttcatgaattatttccgaacatttcttataaaaaaattgctgtcgttttatcagtgtttagtacacttgtcgcaaatataggattaacccagctcattaaggtgtcaatgcctgtcttactgacgatgtatcctatcgcgatttccttaatatttttaacgtttttgcattctgtatttaaagggaagacagaagtgtatcaaggcagtttattattcgcattcatcatcagcttatttgacggtttgaaggaggcgggaataaaaattgaagttgtgaatcatattttctctcagattcttcctatgtataacatagggctggggtggctcattccagctattacagggggaatatgcggctatatactgagtatattccgagcaaaaacaagttgatcaatcaacagcaatatcactcagatctgcaggaaggacaaagtgcttgttcgccggttgcattgcttattaaatgtgttcaaccaaatttacaatcatccttcctcttgcttcgcctcttcgtaaggtaggaagaacatccggtaattgatcaagagttccttcattctgcacgaaattttctaaatttgccggcttaagttcactttcagttacaagtaaatcccgaccggaagagaagaaacaaaaattttacaggctgttagccgaaagactggaatctgagtgtggtatcgcatcaactgatttaattgtatctattgttgaaaatgataatgctgactggagttttggacttggggaggcccaatttttaacaggtaaattgtagttgaatactaccctcaaatgcttgattgaagaaaaggatagagaaactaggttagcggagcaaaccatgggtttgctccgcttttttatgtttataagagaataattaaggaggtattgtggatttctataaaaatattttgacatttcagtaaagagcaggtatatttatatatgaacacatgctcatatataaatattatttgcatcatgttagaatgcttcataacagatttgaaataataaatacatatgtattaaaaactttagttaaggaggagttttttatgggtcacaatcataatgaaggagcaaataaaaaggttttattgatctcttttatcatgattacaggttatatgataatagaagctataggtggatttttaacaaatagtctggcgcttttatctgatgcaggccatatgctgagtgattcaatttcattaatggttgccctgattgcttttacattagctgaaaaaaaggcaaatcacaataagacattcggctataaacgatttgagattcttgcagctgtgataaacggtgctgccttaattcttatttctctttatatcatttatgaagcaatcgaacgcttctctaatccaccaaaagtagcaacaactggaatgcttacaattagtatcatcgggttagttgtgaatctattggtcgcttggattatgatgagtggcggagatacaaagaataatctgaatataagaggagcttatttacatgtaataagcgatatgctcggctctgtaggtgccattttagctgccatcctcatcatcttctttggatggggctgggcagacccattggctagtatcattgtggctattcttgttctaagaagcggttacaatgtgactaaagattccattcacatattaatggaaggaactccagaaaatatcgatgtctatgatatcattcgtacaattgaagggacagagggaattcaaaacattcatgatttacacatatggtctatcacaagcggattgaatgctctttcttgccatgcagttgttgacgatcaactgaccatttcagaaagtgaaaatattttacgcaaaattgaacatgaacttgagcataaaggcattacgcacgtaaccattcaaatggaaaccgaagcgcataatcacgacaatgcgatcctttgtcagcccaaaatggagaagccgcgtgaccaccatcaccattaaattttttatctaactttatagtgaggagatcaactagcattttgcagattctgtctactgacaatttgaaattggcggggtgataatgtgtacgacactatagtaatcggggctggtcaagcagggatctcgataggatattatcttaagcagtccgatcaaaagtttatcattttggataaaagtcatgaggtgggggagagctggaaagatcggtatgactcattagttttatttacttctcgaatgtatagctctttgcctggaatgcatcttgaaggagaaaaacatggatttcctacaaaaaatgaaattgttgcttatctaaagaagtatgttaaaaaatttgaaattccaatccagttacggacagaagtaataagtgtcctaaaaataaagaattatttcttaataaaaacaaatcgggaagaatatcaaacgaagaatcttgtcattgctacagggccttttcatacccctagtattccatcaatatcaaaggatttagctgatcatattaatcaactacactcatcacaatataagaattcaaaacaattggcatatggaaatgtactagtagttggtggtgggaatagtggtgctcagatagctgttgaattatccaaagaaagagttacatatttagcctgtagtaataaactagtttatttccctttaatgatcggaaaaagaagcatcttttggtggtttgataatttaggagttttacatgcaagtcatacatcaatagtaggcaaattcattcaaaagaaaggtgatccagtatttgggcatgaattaaaacatgcaataaaacagaaggagatcatcttaaaaaaaagagtcattgccgcaaagcaaaatgaaatcatttttaaagattcatctacattagaagtaaacaatattatttgggctactggtttcaggaatcccttatgttggataaatataaaaggtgttttggatcaagaaggtcgaatcatacatcatagaggtgtttcacctgtagaaggattgtactttatagggttgccttggcagcataagcgaggttcagcattgcttcaaggcgtaggaaatgatgctgaatacattgtaaaacaaatgaacggtgaataaacgaagcagagcagtaactcacatgtttactgctctattttattgtgaataagggtagcgaagtggagatgcgccttctcttttatttaagaagttaacatagaaagagaaaaagctctttaagacatactcatatttttatgttcaacaatggtcttaaggaggctgcgcattgaatttgtcaggtacgcatctttatggcgtataaagattgttgagatacagctatctttctcaggtaatgggtgacaataaaccttaccttgtgcagctagatgcataacagcagattccggtaccactgttataccgagtccaagtgcaacactatttaagattgtctctaggatgttaaattccatcattctgtttgggagcacaccttcatctttgagccattgttcaagcctagaccgatacccgcacccctgattaaaaacaagaatcggagtcgttgaaaaatcctctatattaaacgttttgttactggttactagagtaagtttttcagtataaacatcatactgttccagaatagaatgtttcaaagggcctgaaataaaagctccgtctaattcgtgattcatgacctttttaataagttcctctgttagaccagcctgcaatgataaatccacattaggatactttttataataggaagctatgatggtcggcagtatcctcactgtttccactgtaccgatttttaatattccagatggtatttcagtatctagaaagacctgctccagttcttcaacatctttcaaaattttgttaacgtattcaatcatttttcggccctctgggcttagtgaaaccccttttttatggcgattgaaaagaggtgttttgagctcattctctaattgcttaatccgcgcagttacattagattgtacataatttaactcttttgcagcaccggtaatactcttgtgatgggctacgcatttgaaaatttgtaagtctcgcagttccatgaagatccccccttcattaaagtatcattatcaatgatgtttttcatcacttttgttcattttacttgatgcttacttctttttataattctcattgtaattttaaagaaaaggaggggaattcaatgaaaaaaagtcaattattcattggtgcccttacatgtttagtggcaagtatgtcttggggcgcgatgtttccagttgcagatcatgcattagaatttattgatccgttttatttttcatttattcgctacggtgtggtaacaattatgttagtgattttattattagtgagagaaggaaaaaaatcatttcatttagagggtaaagcaaaatggatcattttatttggggtgatggcgtttactgtatacaatgttcttatttttttaggtcaaaggttgatggggaagtctggaattatgacagcgtccattgccgaggcactcatgccgatgctttcaattgttattctatggggatataaacatgtgaaacctaaaaaatacacaatgatcagtatattgattgcctttttgggggcttcgatggtcataaccaaaggtaatataagtttctttttttcattaggggatcatctattctcgctactctttatattcattggtgttttaggatgggttgtctacacaatggggggacagttattccaagagtggtccacacttcgttattcaacattgacatgtttattcggcacagctataacaggaatcatgacagctatacttaccgcgcaaggttacgtgtcggtaccgagtattaaagtgattgcagcaattaagtatgattttttatttatgattactttaccaggtatcatagccctccttggttggaactatggcattaaaatcctatcatccattaatgggattttatttattaactttgtccccattactacattgttaatcatggtgatcaaaggatataacataactgcatttgatatagtaggaacactgtttgtcattattgtactcattttaaataacatatatcagcgtaaggaagattataagcaggtattacaaaaagaaaaaacacatttgactatcagttagacggtgggggatttaaaatgtttgaaggtttattgtttttcatttcagctggaattgtctgtgaacttgctgcaattaatagaaatggccgcaaaaatataaagcaacaggcggaattgattcaaattttaaaagaaaaccttaataaagacattaaataaatcaagacggttggatattattgaaacacaccagaaaattcaggtgtgtttttattttgcttccttttttaagccttaaaacgccactaatcgttagttgaagactatgggaaccactctccatgcggaaaaagatgattatttacatcattcagagttgattttaggttcttttgaacttataatgttatatatactgttttttgtttattcagaaaaaaaggatgttataaaaataaaagaaaatatttacatcggaggtgtacgccttactaggtaaggcaaatcattgacaaccattaaccttataatctttactattttaattgtcttaacagcattttttgttgcgactgaatttgcgatagtaaagatcaggtcatcaaaaattgaccaactcatattagagggaaaaaaaggtgccgtatcagccaaaaaggtcattactcatttggacgaatatttgtcagcttgtcaattagggatcacggttacagcgttgggaattggctgggtcggagaatcgacttttgaagtgattctgcaccccttatttgctcattttcatgtaagtgaaacagtctcacatgtattgatcttagtgattgcttttgtgatggcgacttttttgcacgttgtagttggagaacttgctcctaaaacactcgctatccaaaaagcggaaaccatcactcttttgactgcaaagccaattatttggttttaccgcatcctgttcccttttatatggtttttaaatggttcagcccggtttatagtaggactcttcggtttgaaacctgcatcagaacatgaacttgctcattctgaagaagaactgcgcatcttactgtctgaaagctataagagcggtgaaatcaatcaaaatgagttgaaatatgtaaataatatttttgaatttgatgaaagaatcgccaaagaaattatgattccgagaagagagatcgtagcgatttctagtgaggattcttatgaaactattgttaagaccattaagacagagagttatacaaggtacccagtcctaaatggagataaagattcaatcattggttttatcaatgctaaagaattcttgtcagcttatattgacacagaccagaagataaaagaggatttcaagttagaaaatcatatcaaccctgttatccatgttattgaatccgttccaattcatgatttattggtaaaaatgcaaaaagagcgaacacatatcgctattcttgtggatgaatatggcggaacttcaggtttagtcactgctgaagatattcttgaagaaattgtcggggaaatcagagatgaatttgataaagatgaagtgcctaatattagaaaagtaaatgataatcactatatcttagattcgaaagtgctcattgaagatgtaaatgatttattgggaacgacgttagcaagtgacgaagtggatacaataggcggctggtttatgactcaacaaatagacgctgcagttgggtccgttatagaagccgatgggtatatttttaaagtgtacaaaacagttggccggcatattaattatttagaaattgtctggaaaaaagaataacatctggataaaacacatgagattttgactaataagatgcttaaagcctgagatgaaattttcatccaggcttttttaacttgcagtttaagtaggtaatcattatcgaagttcaaacgtttctcagcaaacaaggaggcttggatatctatagctcttttaccattaccttctcaccattaaagtcgagttcaccattaaattgaaaaccaaacctttgataaaggcgtatagcatgaatattattttcaaatatacttaaataaattcttttgcatttatatagctcagcaaggtgctgaatgagggctttaagcattttcttccctaatccttttccctgatagcgttcgtcaataaaaaatcggtcaagccagactcgtccgtttttattatcttcatcatactcgggaaacaatccatacattgcaaaaccgactagatctccttcatagtaaagcccgacaggtttataatagtgacattcgtttgcatcctctaaacatatttttgtagattcaatatatgataattgattctggctgacatgtagatcaagaattgcagcacgattatcatcagttactccttttatttttatactcatactacattctccttttttcttatcccggtatcctgatattgctaaaactcagcttaaactatattcacgtcaagcaacatgtagcctatcaaattaagtaccttttcttattgtgcctaaccaggggcattccctgcatccaaatgacttgactttatagaaaatgaattaattcaaagctgcagcatcattctttttttctttccaaaccattgtaagaccaaggccgacaatcataacgaaacctgcaaaaaggaaaggataatgaatgttaagatcaaatagtataccgcctaaagcaggtccaaatatatttcccaggctggtgtatgtggagttcatgcctgctacgaaaccctgctggttaccggccatattggataaatgagcggttaaggccggacgtagcaaatcgaacgccagaaaaataaaacaagttacaagcaaaacagttaaaaatcctgacataacagtagacacgaaagccaagatcgctccggttattaagcacagctgaatcattcttttctctccaagtttgttgaccaatttcccgaatagtaaaacttgaataactaccgcaacaatggaactaatcgtaataatggttgcgatatcttttggtgtaaagccaaatttatgatcagaaaacaagctgaataccgtttcataagctgataaaccaaaagccattacaaagacgataataaatgcaatgaaataaacaggatgaatggatctcttcaagtctttaatgaaatttgattcctttgtatgagatgagagttgatggcgttcttctattgacaatgactcttttagtataaaaacggaagtgacagctgctattaatgcgatggcggaggcgaagaaaaacggcatgcggataccaaagccggcaataaatcctcccgcaccaggtccaataataaagccggtgctaattgcagcagaaacataccccatagcctttgacctttcctttagggttgtaatatcagctacatatgctgttaccgcgggcatgataaaagccgcacttataccacccaatatcctcgagaaataaaatattgaaacatgggtccctaatccgaaaatcaactcagataaactgaatataagcagcccgagaataattattttttttctcccgaaacggtcaacccacctacctgcaaaaggtgaagtaattaactgagaaatggcaaaagccgcaacaagataacccattgtgctgccggataaatgcatgattttcataaaagaaggcataactggaatgattaaaccgataccaagaaatgctacgaagatgttgcttaatagtataatgaatatcgttttttgctcatttattgattttttcatctgaattccccttttactcaattgaaccctttttacctatccttttcgcttgaagcttttttcaagtacaatcaaatcataaggtatatggttaccgtatagtcaaggaggtttttatgagcgaagatgttaagaagtatttcacaacaggggagttttcgaagctctgccgtgtaaaaaaacaaaccttatttcattatgatgagattggtcttttctcgccggaaataaaaaaagaaaatgggtatagatattattcctatcatcaatttgagatttttcaagtcatcagtctatttaaagagcttggggttccattaaaagaaataaagtgtctaataaaaggaaaaacaccagacaagatcctgcatgttctaaaagaaaagtctattgagattgataaaaaaataaatgagcttaagcagttgcaaacgatcttacaaacaaaagtgacgcttacagaacaagcacttgagactgatttttcctcaatttcttttgaatatttaaatgaagaaacattcatgttaagccgaaaaacattaaacttaccggaacgaaaatatgtggcagccatttcagaactcattcatgaagttcagcaatatgaattagatgaaggatatccgataggcggaatctttgcacgggaacaaatcttagaaaaagacttctacaattacagttacttttatataaaagtaaaagatggggcagagaacataaattatcatgtacgaccaaaaggcctgtatgcagttggatatgaaataggcggaaatactgaagaggcataccggagaatcattgagttcattgaaagaaatggaatgcaaataggggaaaatgcatatgaggaatatatgctggatgagatggtagttgacgggtatgaaaatacatatgcaaaaatcctccttcaagttaaagaggtgtaagattacgagattttcatatagaaaaattgcttctgttgtgtgcccaaaaagaatataaactggtttactaaaagcgagcccacagccgaacttcaaaagctataccattgagtaaaaagcaatgtcaacctgtaactatttgtaaaacatttaaacgtctagtgaaaggggcaaggagaataaaataaacttcaaaggggtttaatcatgaaaatgaatgaaaagatgaaagaggttcaaagaaaatatagtgaagagcttaagaaacaagaacttgaagatgataaaaattatattaaagaaacaattattgtcgtaacgataattgtattgtttattgtttattctttattctttattcttcacttaccccttgcaaggtttttaacaaaaagatccctttttcccatttcgatacttaccggtttttctcacaataaataaacgcgcttttttatgaagtaagttcagatgatggggtgtatctaaaatgaaatggattggtaaatggagtttgcttgatggaggggtttaatatcaataaaaaattattaaaaaggttaatgataatgccaattttattcatctgttatgttttatttttaaaccctgaaattatacttgaagagcaatgtcccaataagccttatagtttaacaatcgtaaaacacgggacaggtatattcgataagaaaattgaaaattgttctaataaattacaagatcaatggaaaaacagtagctgttggtaatttggtgttttttgagaatttcggcagagatatagatgttacttgggatacgaatactgatgatggaacttggtggatagataaaagcgtacatttaaccatgacttatgctgaaaatttcaagggggatttagacaagaaagatattgattttgattatggtactgttcaataataatgaagtcaaataggaatatacactaaaagaaccgccagccgggttcttttgtgtttagatttaaacggatttaggagcagtttttctttccttgcaagtaccatggttccagaagattatcataagtattgctggtattaggtattcaatgatgacttattcaaaccaataaacggtcaaccaagggcaaccgattggcaggttgaacaaatccaatcagtcttaaattatcaatacttgaatcatatgcctttgctgatttgttcggagttaacaatcgatgagcttttggccattgacgaggctcttggttcacgaattcaccagatgtgttgtgattacatagtgatttgtaaaagatgccctgaatcatctgatatacaaagatgatagtcaggttgtggatctgaaagttagcaagttttatagcgaagagccaagggtggagatcaagataaaagagatttctgcctaaaaatcaaaaacactgaagcgtttggcctcagtgttcttgatatgaactggtacctctatcataacatagggggcgctttaagattgacccagggaaagttcaaatcattgttttagatgggaatgaaggtactgcccatgtcttagatgctccggagcacggtaaaactgttattcaaactgtaaaggggagctttgcgcaggttgatcatgagataggttacaaagtcaggtaagcaataaaagggagttttatgatggtgccattataagttgaacttcaaatgtgttgtcaagtcaatgacagttgaagcaatgactgtcaatcatacagtagaactataagaaagaggaggctataaacctcctcatagttaacttgaatagtaggcgatataagatccatcaggataaaaagtaacactgtctaaataatatgttgttccgttgatagtgattgtttgtcctgggtcaggatcagaaggaagtccacgaacaactagggtacctaatgcagatacttcctttgtttgacttacttcagaatgagtatcagtaggacttgcggcaaaggcaggagcggcagaaacaagcaaagcaagtgacaatgcagtaccagttaaaacttttttcaacttcatcatttaacactcctttagttttttaatacaagtgtattattacatgaaatgtaaaaatatccaaggtattttttgttaatattttgtgacttagtttaaatatagagcatctcgaatgcctgctcctcaaagtggagcacaacatagaagaagttgggtatagaatgaaagcattataattaataagaggcagtatcggtgattccacaagatgggctaaagcgaaccttgatatggatatcacttcattctcctgttgcttacttcagagatattaataagaagccctaaaaaaagcaaattagctaccgattttaataagagaattaaaaaaggtggaatgtatatgggaatagtgaaggattttcttaatgaactatgtttaccggataaaggaggactactcgtgaatcaaaaagacattgaaaatataatcaatttgagcgtttgttgaatctgaaaaaatctgtagtgtaaaatggaaggcaggtcggcgtggtgaaattatggagccatctaaaacatatagtacataggttaataaatcattcgacaaaatttgcgaattgttcctttgtccttttctttcaccgataataaggagggaggggattaaatgagcagtcaaaaaaaatggggagatctttcattaagaggcatagggatagaaaaacctaaaattcagccgcctgcacttaaccaccctttgtctgataccagttatcttagggaatttaatgagcaaagagctttagaaaaagaacgaaatgagcaagctagcataaaaaaagaaaaggatgagcaagaatatcgagagcaaactcttcaacttcttgcgggtattgaaaggaacaccgcgatacttcatgaaatatcctcattaatgaaaaaaaataatgataagcaaaacgaaacttttgatattatcgttgaaatcctagagataatgaagagtaaatcaaatgaagaagttgttggcaggtatcaaaaggtcatgagtaaaattaatcaatttactaacgatgtcgagacaattaagtctttatatacaataggcgcaacaatatatagtacagcttcaaatatgtttacctaaagcatccttcggggtgcttttttatattctctgtaaactgctaccggaaaatcttagaatagacaatggcggttggtttaaacatggtggcagtttagaagggaatatctttttcaaaacaacacgaatcagaaggaggcggcagtgaatgtagatggtagaaaagcatattcaggcatataaggattacgtcaaaggaatgaaatacaaggacctttccaatcattgtaaagaggagtaggagagaaactccaattgccttccagattacattgcgtttctcctctacccagacaagttgttgacctttccggctattatggtgatgtctgagacgattaaataagctcattaaactagatatacaacttcagaaagatgaagaaatttgtttaactggatgaatctggatatctatgtacaatatttattctatcgggattgacagtagcagctaccaatttaccaccagatggatagatgactctaactttaccacctgaccatgcaggttttcgaatataaattcttcttggatgttcaaataagtcttcaattgaagctgtaataaaagtatcaggattgaatgttggtctgaattctggttcttcaggataatcttcagaatggttttgaggatagtattgataatcacatggaattggaacaagttgatattgtgggtaataataatacactttaaatcaatcttcttcgaagttaatttacaaattatgtatttatgctactcgtaacaggagaaaatactcattttaaaaacaaacacaaacttaattttgaggtccggaggtgggtgagatgtaatgccaagaccacgtgatccacgcagagaggaagcttttcgtttgtgggaagagagctgcgggagcaagaagttaaaagacattgccgaggaattaggtatcaaaagcaacactattcgcaaatgaaaagcaaacgataaatgggaagaaaaaataacagggagcgctcttttacgtcgaggcgcacctaaagggaacaaaaatgcaaaaggaaacaagggaggaagagcaccacttggtaataaaaatgcattgggtaataaaggcggtgctgctccactaagaaatcaaaacgctgtgactcatggtttcttctctaaattcttacctaaagacacactctctataatgaaagaaattaaggagcgctcacctgtcgatatgatttggaaccaaatacaaatccaatatgttgcaattataagggcacaaaagatcatgttcgtttctgataagcaggaaatgattaaagaattgaaaaaaaactgtgctatctaagacaaacgaagtcgaagaggaagagtatgaattcaaattttcttggggtcgtcatatcaacgttcttggaacgtgaaataagtatggcattaaaagcgcaaaacactatttctgttaaagagggcaggttgtttgttgatggagaagaaatagcccttataaaacgtttgaagccaacgtggagaaaaataaatccgaggtcaatatcatgggggcgtcggatgacagggcataaaacgactagagtaaacggaacagggatagccactttttataaagtgactcctcaatttgttcttattatgatggactatgtgaaaagggaaatggtctttacttcactttacaagctgttctggatgacgcatcttcagggcgtggtactgaacgagtcatcttttatgatgtgggctttgattctgctaaaatcacaggaagggaagtggtaccatttacctttgaggactttgttgttcctgagcagttaaaatctacattctaatcacttttacaaaatcatcaaacagattacgaaaaagcttgcgtaaaaaatgacgaaactctcacgagatattcaagaaaaaatgtggtaagattactttagaagtaatccaactagggtgaaatagaaatatgtatttcttttaaaagatatgcataaaataaaaaataccggagtgcggcaacactccggctggtacaaatgctggctccttcttggagcgctggttataggtgtatttagatatggacctaccctagaagtttcctaggcctcaaagggtggtctatttctttttgtctaaatacgtcaacaaagcgagaataaacatcccaaacgcaagcattaaactaagagcttgaaatgttgacataaggcatcaccccctttcaggggatttagccagcagtccacctttgggttagccgtgcaaatgtacaggaataattatacactagacaaccatttttgtggttgtcttttttgttggtctaatcatgtaatcctaaattcaaaggagctaatgaacatgagcgaaaacaaaacgaaaaaaattcaaaaagcacaggctgtactatacttctacaagataaaggagcaaagaataacggcatatacggcatttatggtccgaaaacagcagatgcatgagctttctgttgatggaaactatggaccgatacgagagcaaaacttgaagcattattgaaataaaggatggccctctgttaaagggccttttattaacctaaagaatgtgtattttttatttgcgtgcccattcattccacaaaggttctaagctgttttttagatctatgaacatccatgggtagagttagaaaaaaagtaataatagtagtattccatatactgaatgtgtatttaaataagtctataagccaaattttaaaagaggtgcctccttcaaaatgatcagcaactatttgtaattcctgtggtactgaaaaaaacagcagacttagaagaatgcaacataaaattatttgctgaataaaatcgatgaagaatttacttttgtcatatgagtttgatgtaagctttatggcaattgaaaaaagaatgtacttaattaatatacctggttataaagacagccaaaagaattgcaacaaaccaataatatggaagcatatggacttgtactcctatgatttaaaaaagaataaagattcagggtgatcaaaatgcataaaattattaattacatcctagtggggttattagtactctagatcattgtatcttttacattaaatataaataatgatactccttatataacagttgctctggttctcattattgtatcttttgtaatagaaagaaaaaaggtacacaaaaaatagaaaaaacaaccctcttcttatattgaagagggtctttatttttaacaactgtaatacacaaattattgattaaagtatgtatgaattattgtacacagcggatatgtttaatttcatttaaatccattttacatgttttgttctttgacttctcatgctgacggctttatggccctcaaagagatagcgaaaccgaagcatctttggattaaataggccctctcataaaatgggggcctttcagtgtttcttttaaatagcttcttttagttgttctattacacttttcaaccattctattggtggtaatccaattgccgggaaatatatttctgtattacactttataatgtcttccttttcttcttcagttagattgctatttagaaactcttcgcaatactctactgtaaatagcaaacctgctctactaatttcctcaataaattcgtctaatgcgtgttcaggcgattggatatcttgatgaaatgttccacctaaaaaattttctaattcgtctaagaaatcataactttcatccatggtacttcctctcttttttatatggttggttggaataagcccccattaagagggacttgtctagtactcttctttattaaataaaacatcgattttgaatgaatgttatttaagcaacagattctctctttatatcaaagatatcaatctgctttgattccaaaagatcttgtaaatggtctggactgtattgttcagctatttgcaattctccttctgatataggtatagccattagccaagtaacacttttgttgctaaattcaagtagttctaaatcttcctcccagagaaatgggggaacgaacataacatgtttcatatcggtttcctgatcatacatactaatcacatctttaaaaataacacctggtgcacaagagaaatttgagttgattatattaaaggcgcaagttgataaaacattagcatatatgtctgaaactgactccattgcagctacgatttctatccgtaacggggtgccattcacctcataattaatagaatgatccgacaagctagagttgagtacgacgtgatatcttcctgaggctggtcactaaccgataaaatatctatgctgctattcttgttattgtcctaatatttcgtaatttttggtttacctccaaaagctcctaaaactgttctagcaattactttattttcttgtgtaacgcccattagacaatcactcctaatcaccaaagtcaaaggtaattcaggttgataaagctctggatttttgctgttagtttagaattcgtaaacttgaaaacctgatctggagttaagcttttgttgaattgtgctaacaccaaaaggaactaacattttgtgctaccgaggctctgttcttgcctttctttgaagactttatattgctggaataattttattttcccaatctgtatatttcacattatcatactttttggtagcaacaatttttcatgaatttaaataatcgccaggaagccgttggatagttatattttgattagactcttggtttgaagaacaagttgtaatatcattttgagaaaaagtggttggaactattggtgctgtaatatctttgctctgttcattgttattttgttgagcagcaagtatactgttcgtaggaatcaacaaaacaaaagacattactaaagctaatacaatttttatactacctttcattcaaaaaacatcccttctttggttatatgggcccgtatataatatacttcttattgggattttttgtttaaattttgaattgaattaagtgaaaattaagaaaggtatggattttacagtgaaattactaatgagttttgtatttggaactttaggggcattattaatggtaagtgtgagagaaaatttttctttcactgtgacattaattgttttagttgttgttattatcgttgcttttattcttgatgaggtatggaaaaggcataaaaaaaagagagaagaagattaattttcttctctcttttttttagtcaatttggtttattttgatctttgggtttagtgaattttgtagaatatccagcggctaataaaaagataatggcaagaacatacgctaaaataccttgatgaaatacgaatatagaaattaaattagatgctacagcaagaataatgaaaataattgtatatatgtttaatcgcaatagggagacctcccttggtttcttttgaagaattttatcatttgtaaatagaaaaataaagaaagccaaagtacccaaaggatatttggctttctttatttcgtttagttatttattgggcccacaatcttctaagcagttcataatctgtacgctatataccaataaaggtccttcaatacaagcagcgcaaaggatgatcgtgccacaggcagccccacataatgctgcgaagactccaatagcccagttacttagcccttggtttgctaagcaagtgttcatacagcttaaccatccttgtgcagaaatctcgccttctgaaattggtgtagtccccgtagcagtctcttcattatcaatataatatctgtaggtaactgaagaagaatcttgattttcaacaatgagttcttgatatcttaaaaaatctttttctttatcaaatactaaggtaattgcacttgtttctttaatagattttttaattttatatgggattgcgacaatatagttggaatcctctgtgtttttattgactactgcattatccccgaataaattatgtccagttataacccttaccatttgctgaagcagaaccttcttgaaatagaacaaagccccttagaaatttcatggggcttcaaaataacataacaatgtacaacatagaaatattcagcttttccttatagcttaatattatatttctctttaatggtttccatatatttttctacttctaatttattgtctgggtgtcgttctacatattgaccaacaatttcatttaaatatttatagaaattttcgtaatctaatatgacttcttcatcttctttgactgttgggtaatcgaaataaaaagctataccctcatctccaaagtaatcttcttcccactgttcgtagtcatcagcaaatacacaccagacattctctataccataaccttctccgttggagaaattctctaaaattcgtataaatcgttcatcaccaataaccttaaagaaataattaattaattctttatttttattatccatttcatttttccaccgaattaaagcctctcataacgagaagtgctttccaccttttaatactctcttctcaaaaagaaggggaaaggctttatccgtttatccctcgtatagtttattaatcaactctgtaaatgaatcacaaacatagctaatggaactttccttatcttcataagctatctcatgatcccaaaaaacaattacgggttcttgagcagacattctgtaatcaaaacaaaagaggtttccccctgcatctgtagcaaaaggtatgatcttatcaactaaccggtctttaacattatcaatggtactaaggagatcaattggccgagtaggatctcctatgctcagtaaattgttgattgtttctcgagaattttggaataaaacaacctttttatctataggggaacatccattatggtctttaatgaactctctgtaatctgttgggaacttgatttttaatttctcttctacatactcaatttgattgtttgtagcctcttgaaaagtgcttcgttttctccatttaatactttgcatttgttaacctcctactgtcatatacctggcaaagttatcccttgtattaaataaaaagagcctttctcctcaaaaagaaggggaaaggtcttatccgtttattcctcgtatagtttattaaccaactctgtaaatgaatcacatatatgactcaaagctttatcaggatcttcatatgcaatctcgtgatcccagaaaactacggacggattctctttattaagacgataatcgaagcagatttcgttaccgaaaggatcacaagcaaaaggaactaccccagaaagcatccttccatcctggtaatcttcaaagacctctaaaataaaacttgaactatcctcagttagaccatgtaatcgattaaaaacagcaccttttgtatttttaaagtcaaatatctttttatttgggcgcgccccattgttgtttaatatagttgtaacatagttgctagggaacttaatatctaatgccttttcgatttttttaacagttgtttccccaataggtttttcggcaaatctccactctgtcatattgtccaactcctatctgttcttacttcctccaacccaaaggtgtcgacctcctgtatggcctgttttctgttgcgtcttttgatcaactaattgcatcctcctgaatcttgatgatattgtcaagtataaccattcggtgttatcccatcttcaaacagaataagaatagaaatattgtcgaagttttctggagataagtttcagccttgggatagtgaataaaatataatctctttcggcctttgacggaaatatcgtctgaaacagcagacagttcgacgattgtataatgcatgggctttctgctaatggaatttacggacctaagactagagagaaaatagaagcgttattgaaataaaaaaaggccttcttttcaagaggaccttttttataatattaattctcgatatttttaattacctgtctaaccatctcatgtatttggtcaaactgccattctatatcacctattactaaatgtaactgtagtaattcagaagttagtttttctttatcttcaatttgacttaaattagctaaaattttattcattctttcatctatttgcggaagttctttaatattttcctcttcttctaaaagttcttctgttgaaattaatgtactattatatttttcatttaattcttttaaagcactaaagattttatcaatatttttcatctatcttaaccacctattttaattttcttccaatggcattcttagtcttaacttcgttcaatgttccatccaaattcaacactactcttaaatttcctcttttatcgaaaacttctaaatgatccttgtgcaaattatctaaataaaatctatcgccttttttcagatacgaattatccaattttttattaacttcatagattgattggccttggaattgattttttgtttttgtaacattgttttttatagtttttccaaatccatcattaaaaaattctttcatattcgatacggatttagcttcactggttatcttactactattagcattccccttagaaccatgatcaacatcaaaagactttttaatttgttgaattgtatcttgtccagatttttgtaagtttagcacatttataggaacatcactagctaacagaagttctttagcaaaaggatttggtattgactctaaaccttttttcaaaagtttcccaaagtctttggtgtcttttactactttttttgatgcagatttaccaacatttccggcactgtttaccccttttttacccgacttgctgattcccttctctgcgactttcccgacctttgaaacgacggatccactctttgtaacagcaccaccgccgcctgatatgaataggctggctacattcaaagtgaaatatgtggtgtagtgcgattgtgaatacatatctccgttacaaagtttttgtcccagctttcttttacctcatcccaagtagaatcccaggcttttttatagtcgaattcaaaaacggactttatcgttccttttggatctaaaccgagatcgatcccgaattttgcaattcctaaaagtccttcaccagtttccttcgaaaaatcataatatgccatttgtttgcctttatagtattcatatactggacctaggtattttttacccgctgcatctataggggctaaatattctttaaccgtcttctctgtatcatctataccggctaataaaccttcatatacaccgtcaatctgttctttcaaaatatccttggtcgctcgaagaggattatcccaaaactcgagggatttaacatactcctgttgttcagtggtgaggttgtcgtatccaatctctttagcaacttttagatactcgtcaggatcatcaaccaacgtattgagctttttctgtaattctttgatttcccaatctttttcttctttcttcttaatcatcaaataagcttccgttcgcttctcaatatcgccttttttcttatgtatgtcgctttcacggtatgccttggcgttgtagtggatgggcgtagcgtttttgcctttgccagttgcttcttggagcttttggaaatctgacttgatgaattgttcatttggttccgacatagcatattctgtcagtaaatcttcgtcaagatcacctagtttttcaattgtttttttgcgtttatcattggcatctgcaagcttttctttgaaggtttctgttgaaaacaagtcgagcggaaggatgtcgtcaatgtcgtttaggatatctttcatggcttttttctgctccgacatgattgattttgattttttatgggcgttagctagttcatgttctagaaaagactcttcaatataagcatcagagagacctttgtcttcgacagctccggcaatgctgttaaagaatgcgattttcatgtcaatgtagtcaatccattgatcagtgacaccaacctaatcgtgatagaatgctttaatgttattagcgcctttacctgagaattcactgtcgtcaagttcagcgacgctttgtaaagcttttctcaagttgaccatttgcgtccttagttctttatattctttggcgcgcggtctgtagcttcagacataagtgttttagcttcaaagactttcataatcataccctttcatttaatcatatatcaaaatattaccatgaaagaagaaacgaacctaaaattaacttgattgatcatatcaaagatagcgaataaaaagtttgcggtttttttgcggtccgaacactttttggaaatgttagaatattacataaaaagacataaaaggaggggtcctgtgaatccggttttatcatcgtcagaagttggcgtaaagatcaatgaatggtataaaatgatacgtcaatttagtgtcccggatgcagagattttaaaggcagaggtcgagcaagaaatccaacggatggaggaagatgagtatttactcatttacttctccttaatgaaattccgtcatcagctcatgttagattatttggaacccgtaacgacacgtataagaccaactattgaggaacttcttgaaaaaattgagacttcaaataaaggcatatctggcctgttatcgtattattctctgtttttcagagggatgtacgagtttgataagaagcaatacatgaaagctatctactattatagagaagccgaaaagcagcttatacatgtccctgatgagatcgaaagggcagagtttcattttaagttagctgaagcatattatggtatgaagcaaagtcatgtgtctatgcatcacgttaaacaagcgttggatatttataatcaatatgaactttataaggtgcgaaaagttcaatgtatgtttgttatctcagggaattatactgattttaaacattacgaaaaaagtcagccgcatcttgaaaaggcattaaagttatctagggaattgaataacaaaaggttgattagttctgcactatataatttaggcactaattttgctgacagtggtgattacgagcaggcggaagtatacataaagcaagcagtggagattacagaaaaagaaaagctcacaaacttgccacattctttattttcttatgcaaaaatcctttttaaacaaggaaaaatgaatgaggctatccaagtaagtaagaaaggtttgtcagcagctctttatcaaggtgatgagcttttcgcaaaattacagggatatttaaatgctctttatgtcgatgcagtggaccaacaaggtgttaataaaaccatagaatacttagaaaaaaataagaactattcatatattgaagacattgcctgtgagaccgcagctgcttacgcaaactcaaaagaatttgaaacatcctatgtatatcatcagaaaatgcttgagactcaaacacaaattcaaaggggagaatgcctgtatgacttttaaaaagaaggtatgcctaatcctgggtttgtcacttgttttagtgtgtggtttcggatccttaacagaaaatcaaactcaaaacacatttcatattgcctctgatcgttttcaaacttgataatattacattcaacctccttcagaaatggaggtttttttatttgatatcaacagaaacattggaatcaaatgcgatataattagtccccccctttaaatccttgaggcctaatcttattttttggagagaaaaaggcaatagggcaccgctataacttttggttctccaggaaatctctcagatgggaattaagtggttttgggatgcaaaaaagacgctttcttataaaagaatagcgcacgattgttgaataccttatctttctaactcaatgagttacatttaaagtgattttgaggcatggctgaccaataacactagctgcccggtatcaaacgaatccccttcacagagcttcagtgtttttctttctgatggaccatcgaatatgtcttcaggaagttccagttcggtagcattaaagattgtaagtgaacagcatttgtcgatgtcgtgatgacagcagcatattttctgttattcgaaaaatggggcttcttatcctgaattcatggacttccgttatatccttatggacgtcttacataaatttgtggagagttcctttgccatggttcttttaacgcttcaataaaatcctgatttattttgcatagtttacggtttagtaatcatccatgtaacaccaaatttatctatcacttctccatagtatgcgccccatggctgtaaagcaaagggatatttgttttctccaccctcaccaagcttggtatatgcctctcttgcttcgctctcattatcataggttaaagcaagactgatgctacgattaccgaccacttgttcaaaggaatcagaaagcatcagaatattgtttccagctatcttcaaagacagatgcattactttctccttcatatcttctggagtgtctggtacctcaccgaatgttttaagtgatacaatttctccaccgagtgattctaagtaaaaatccgcctggcttcttgcgtcctctgacattagataagagtttaattgtgctcccatgatttcaacaacctttccatttttaattgtctttctacgaatacaacgaatacgacttaatgaaatcgacaaaggaaaaaacttttttaaaatctttttaacatgtggagttgttccattaaattgattttcataaatcagaacatttgagtcccttaagaaccccccctatcctcctggattacttttcgacaattactttcgacgtgaagcagaaaattcctgccagtcataaaagggtagtacggacgtttattgtttgtgctcaccattttttaaccataattcatataaatgtaaggaaatgagggcaaatgaatataaggaatgtaatgaaaataagcttccataaccaatgatatggatttactatgttgagggcctcctggttatataaaattcatggtttttaaactatcggtttttttagtgtttttttcatactccctgaaaatctcctcattaggataatcagttattacatagcatcacctaagggatgatgctgcttgaacgtctggctaaatcttaatggtgggtgaaagcaaataagtaaataacctgcaatgactgaacttttcatcggcagtatggattaaaatagcatcttaaatatttactcactttgtagatacagacagagcctcaaatgttggtttcataatagttggagatcaagttagggactaaaggaaggaaaaaatcgtgcccattttgtgcccaaaatagatataaaatgatgcaatgagtgtgtattagataacttcagacgcttgaaagcttctgtaactgacaatatacttccactttattgagggcaacgaactaataaagaagataccaaaaagccattttggtatcttctttgtttgttttttctttagagctattaaatccatctaggagtacgatgacttggcctcaacaacagtaactaaatactatatcgaatctatttgaggaaactgattgatgatatattgcttgaagttttcagtgacaggtgataggtgcttccctttaatccaagagaggccaactgtacgctcaaaccttggccaactaatccgaacctttgcgatattcgtttggtctaagcctttaaaatcagggagaattgaaacaccaagacccgctgcaacaaaacctgcgattgttgtagcttcttcaccttcaaatacaatgtttggggtaatattaacttgctcaaaaatatcatctattgtcactcgaagggcgaaaccttctttcattaaaacaaaaggctcattagctatttcgtttaacgtaatatcctcacgagtagctaacacatgtttttttggcaaaaataaaaaaagctcctccttccataagggtttccacattatatttgattcgactggaaaagaagcaagtaggcagagatcaagctcacctgattttagtttatctaaaagcaaattagagtgagactggtttagttgaaattgaacttttgggtaattatctttaaacgttccaattaaatttggaactattgttgtacccagggtgtgtaaaaagcctaaagacacttcaccttgatccggttttaaaagagattgaatttcttcctttccttctgtatattctcgaatcatggaatcaaccctcttgaggaatatttccccatatttatttaatttaatggaccggccttgtctatcaaaaagcggaacacctaagtgattttctaatctaacaatagaccgagaaagtgctggctgtgttattgataacgtttcagcagctttggttacatgctgtatacgagcaagagtttgaaagtactctaattgttcccattccataaaaaaacctcacttcttataaatcattacataaaagaattaaaatcatatttattatgcattatacatcatgatttattagtgttaagctaaatttagcagcaaaataaataaatttttatatgaattttaaactattttcgtgttcagaaggaggactattttaatgaactatcgaattgaaaaagatacttttggagaaataaaggtgcctgctgataagttttggggagcgcaaacacaacgtagtaaagagaacttcaagataggttctgaaaaaatgccaaaacgtattgttaaagcttttgctatattgaagcgcagtacagctattgctaataatcgtttaggaaatttggatagtgaaaaaacagaggctattaccgcagtttgtgatgaaattcttgaaggcaaatatgatgacaattttccactcgttgtttggcagacgggaagcggtacacaaagcaatatgaatgttaacgaagttatagcgaaccttgcaacatctttactaaaagagaaaggctctatccaaaccatacatccaaatgatgatgtgaaccgcagtcaaagttcgaatgacactttcccaacagcgatgcatgttgcaggtgtattagctatctatgaacaattagttcctgtacttgatcaacttcggaacacattagatgaaaaagcaaaaaaattcaatgacattgtaaaaataggtcgtacacatcttcaagatgctacacctcttacgcttggacaagaaattagcggttgggtatatatgattgatcgttcgaaagaaatgatattggaagcaactgataaaatgcgtgagcttgctatcgggggtacggctgtagggacaggcattaatgcacatccacagtttggagaagttgtctcagaggagatctcgaagtttacaggccaacattttaaaagttcacctaataagtttcatgcgttaactagtcatgatgaaataacgtatgtacatggtgctatgaaggcattagctgctgatttaatgaaaattgcgaacgatgttagatggcttgcaagcggtcctcgctgtgggatcggggaaatttcaatcccggaaaatgagcctggtagctccattatgcccggtaaagttaaccctactcaatgtgaagcccttaccatgattgcggctcaaattatggggaatgatgcaactattggttttgcttcaagtcagggcaactttgaactaaatgtatttaaaccagttattatctataacttcctacaatccgtgcagttattgagtgatggaataaaatctttccatgatcattgtgcggttggtattgaacctaatgcgaaaaccattaaagaaaatctttccggatctttgatgcttgtcacagcattgaatccttatatcggatatgaaaatgctgcaaaaattgctaagttgactcataaagaaggcttgacgttaaaagaggctgctgtgcaacttaaattgctaacggaagaacaatttgatgagatggttaaaccagaagatatggtgaaaccaaacatttaaatcttttaaggtgaaaactagttactgatttgtagctagttttttctttttttacactcattgaaaatcacctcattaggacaaacagttattacatagcattacccaaggggtgatgcatttaatgaaggtgataatcatcgagggatcgcaagctgacaaatgcattaacgattgctatcattatttaataaaactttataggaaggagatccagagtgatagcaatatatgtaagggtatcgaccgaggaacaagcgatcaagcaagcatcgacagccagattgaagcctgtataaagaaagcagggacaaaagatgtgctgaagtatgctgacgaaggattttctggtgagctttttagaacgtcctgctttggattgcttgagggaggatgcaggcaaaggacttataagttcagacatttgctacgctttctcggagagcttatcagctatgaaaaaaatgattttcataactctttcaaatagagaaagccggaatatgagatccggcctcttctgcattatttccccttcgccttcttccgcttttccttctctgcccgataaaactcatgaaacatcttcatcaacgcccgcttttcaatccgcgatacatagctgcgcgagataccgagttctttggcaatctctcgctgcgttttttccttcttcaaatcaagtccaaaccgaccgacaatcacttccttctcacggtcatctaaaatgtcaatgtattgtttcactttttcaagctccatattgagctggatcgtatctatcacgtcttcgttttctgatttcaaaacgtcaatcaggcttatttcattcccttccttatcctgcccgatcggatcgtgaagggagacgtctttttttgtttttttcaatgcgcgcaaatgcatgaggatttcattattaattacaaaaggggggcgcatagatttcccgtaacagtttggctaaataaatgttgggtcagcttcctgtaataaatgctcaaacgtttcttagcgaaagaaggggataccttaaatagccaagccacattttcaattgcatgtgattgtatgtacgaaagattaatattacgcaacatgaaagttggaatgcaaaagtgatatgtaaaataattggactgccactctaaataatctgtccaagttgcaggcattgtttttttatcgccttcatgtctatatatatggcaaaattcatgagcgaaatcataccattgttcaattcggctttttcggctgtccaagcatatattataaatcccgctgtgtttaagtgcgaagcttgtaacaggtttaaacgacagtctgatgtctaaagcttcggcaatccgttcaaaattaatttgttcaggttctgtaatatcaatcttcctgtataagttttcaatccaatcctctaaatgactgtttgtatacctcaagatgaaaaacctccttaaagacgacaatctaaaaattggattcatttaaatattataggaaaatcaagacttttttcataggaaaatgcgtctaaggagatggaatatgaatctgtttaataatggctgttttcgtaagtatgatgattttaacacgcatctggatttccctcgaaaagtaaaggtctttagggatttatgtcaaaatgatagtaagtaccttatacaacaaacagggagtttggttgcttaataaggagggggaagtatgaaaaaaaatattcacatattgggagcctctggtgccggaacgtcaacattaggtgctgcattatcaaagcgtttgcctcatacgcatctcgatactgatgattactattggttagataaattcactaaaaaaagagaaattcctgaaagaaaaaggttgcttgaaaaagacttaacaataaatgagaaatggattctttctggtgcagtgtgtggctggggcgataatctaaaaagttattttgaccttgtcgtcttcttatggattccacaagatatacggcttgatagattaaagcatagggaatttcagcgttatggaaatgaagtgttagccggtggcagtaaatatgaacaatcaaaaacatttttagagtgggcttctttatatgatactgctggaatggaagttagaagtagagctttgcatgaacattggatggcagatttatcttgtccagtgttaaagattgaaggcgactgctcagtcaatgaaagagttgaccgtgtcttggattatctgagttctaattaaactaacggatagcgattatggtactgtccaataataataaagcagtttatttaaaataagaatatacactaaaagaaccgccagtcgcggttcttttgttttcagattcaaactgatttaagaacagatttttctccttacaaataccatgatcccggggatgatcataagtatagctggtattaaatagaaacaatcaatacatataagtcctccccctgagacaaatagtagaacactgctcaactttggcttaaataagacaacaattgaagctgtaaacccaatacatgaaaggaccaaagatacccatgcctcaacaagaaggtcgcttgtcatttcaaagtatctaattaaatgaaaaaataaatcaagataggcgataactaaagcaaaaatagactctacaacacccaataggctccctgtcaaacttaaaaaaaactcaatgtttctcttcacaataaacgctccttatgtaatcaggccacttcatttttatatatgaaaatgtaaaagaaacataaatgaaaatataaatgagaaaaacaacaaaaacccttgtcacgtaagggtttgcaaaggattcaaaaatcactttttaaatgagggtatgagtgaaatataaatgagaatctaaatcttattagtaaacagaattaaacataataaacagaaataaataataataaactaactgcgtttatttatctgatttccgtctttcctttaattgctccgttataatctccaaagcagcctgtagaatttcatcagttatttcaccgtctttagctgcaaggaatgtttcaggatcgtttaacactttttttgcatcgtcagtgattatattggatgatttatcttttcctcttaaaaggtagtctgtagatacatcaaaaaagtcggctattttgattaatgtttcgtaatcaggttcgcgagtgccttgttcataattagcaagttttcctcttgaaaagcctaatctatctgcgagttcatattggcttagacctttttcttttcttaaagctgctatccttttacctaacatatacactcactccttgttattaattataacttggaaactaagcgtttctacatttagaaacaaaaagtttctaaaaacacttgacggacacgttttgtgtcctgtatattataaatcgtaaaaggaaacaaaacgtttctaagggggtgttatgagtggaaagagaagttttgttttccttacgtggaaacacgtcaagaacagtagttgctaatgacttaaacataactccacagatgctaggggctattgaaagaggggatagaactccttccttaagtctggccaaaaagattgcagactattatggaacaactgtagatgaaattttttttactcaaagtagacacaaaatgtgtcctaaatgtaagacaaggacagataagggggcttaattatgaaagtcatcttgaaaaaaggaccgctgtttgaacaggcagaggccaaagcttacaaatatctcagtagcatacttgttcagcgcatgaatgaacaccaagagaagcttgcacaacaaaataaaaaggaatcagcctaagtcatataaacagcatggtcttttaacttcaattttaaaactgaaaactcaatatatcaggaggcaaacatatggagaacaacccatacaacatgcggaatttaccgcagattatgcgtagtgcccgaaaggctgcaggtctttcccaataccaaatcggcaagttaatcggaggtaaggatcaaaggtatgtttcagacgttgaaaatggacttgccaagcttactccagagttatgtattaaatggtttgagaagtgcgctgcctatgaacatattgatcttgtacattacttattcaaacttcatcctacagccgctgctcctattgatccggcactcaatgaatgtgcaagtaatgcggtgattaatatggttcaccaattggaggaagcactgcaagcaaccaaacatttagcccgttggctcacggataaccgaccaggtaaaacagaggagctgccgatggccgatattaagcagatttttgatttgattgcggctaacaaaacattgatttattcacttgttcgtactcacgggttgaaaatgcaggagcttgcagataggtggacacggaaagctttagttgatcaagttgctatggcaaaacaagaaggaaggcaggcggtttcagtatgaatactaatcatttcttgaagtcagatgttcttatcgcaaaaagaaaaatcgaatcagcagaagagctatcaatcatgctgtcagaggcattacgtgatggtgattatgaagaagcgattagtcttgctggaagcatcaaggttcttactgaggatattagccgacttgcaaacaaaggacgtctttatgaaacggcattaaaaatgcaacagcaaggtatcaacttaactgtagtgagcaggtgtataggataatggttcattttgttcataaaccggcaactgctctggaagttcgtaaatggtgtgcgatgattcgtaacaatagtgaattccatctgttatgggatagacgtgcagacaaattcagagaggagaatatgaatggtcgaaaacccaatggtcataaacaactggcacgataagctaactgaaacggatgtgcaaatagatttttacggtgatgaagtaacaccagttgatgattatgtaattgatggcggcgaaatcattctcagagagaacttggaaagatatctaagggagcaacttggttttgaatttaaaaatgcgcaataaaaaagcccactcggcaaagtggacttctttaaaggctatcaataaaaactcatgtgcaaatattttatcagatagcctcaataaaaacaatgggggttagggttatgacaagaagagctgaggttcttgctaagacttctgaaatgagccgtgatgaatggcttattgaaagaagaaaagggattggcggctcagatgcatccattatcttggggttaaacaagtggaagacaccttttgaattatggttagacaaaacaggacaggtccctgttagtgaatcgcaaagtgaagctgcttactttggatcattgcttgaagacattgttgcaaaagaatttgagattcgtagtggcaagaaggttagacgtaaaaaagcaatacttagacatccagaacatgatttcattttggctaatgtagaccgaatgatcgttggtgaaaaagcgatccttgaatgtaaaacaacctctgcttacaacttaaaagaatgggaggacgaagaaatccccgagagctatatcgttcaggtccagcattacctgggtgtacttggacctgaatatcagaaggcttactttgctgtgctgattggcggaaacaagtttgtttggaaagagattgagagagacgacgagttaattgacatgatctttgaagcagagattgagttctggaatgaaaaggtcttaggtggacaagctcctgctttagatgggtcaagtgctgcggaggaatacctcaaaaagcgatatgccgaaacggaaaataacaaagctattgatttaactgcgactaatcgagaacgtattcaacaatatttgcatcttaaagaacagctctcagagcttcaaagtcaggcaaaagaattagaaaaccagatcaaacatgaaatgaaggatgcagagtatgggtttatcggcaactatcaagcttattggaagcctgttgtctcaaatcgagttgacacgaaaaagctgaaagagcagtttccggatatttacgaggaggtcaaaaaggaaactcatttcagacgttttagaatcaaggaggttagctgattatggctactaatcaatcaattaaaaacaacatccaaaagaaacaaaaaagcgcacctgtgcaacagcaaggagcaaccatgaagggtttactttcctccccatccgttattaagcgatttgaggaagtattagggaagagggctacacagtttactgcctctatcttaagcctatataacagcgagcagatgctgcagaaaacagatcctatgagtgtcatatcctcagcaatggtggcagctacactcgatctgcctatagataaaaacttaggatatgcctggattgttccttatggaggtaaggctcaattccagcttgggtacaaaggatatatccagcttgccttacgaacaggccaatataagtccatcaattgcataccgattcatgaaggagaattgcagaagtggaatccattgactgaggagatcgagattgattttgaaaaacgagaatcagacgcggtaagtggttatgcagcttattttgagttgataaatggcttccgaaaaacagtgtactggacaaaggcacaagtagagaaacacaaaaagaaattcagcaaatctgattttggatggaaaaatgattgggatgcgatggctcttaagacggtattaaaagcagttttgagcaagtgggggattctctctgtggaaatgcaaaaagcagttattgaggaagataaaacaagagaacggattgacattaccaatgaagcggatagctcagaaattatcgattccgagccttcaaacaaagacgaaccggaaaaaacaagcgaacaagaagctgatccttttgacggtaagcctgtagacataaaagaagatgaacttccgttcgattgaggccggcacctgtgacataactgcactctgtgaaaggaagtaggtgagtgacttggacataaaagcaatggggtatgtggtcataccccgactaccattcaaagagtttagggatgaaaaaatttatgatcacttgttcaaaagagctgaatacaggccaaatcaagagctagagcttgggcagaccattatcaaaattgtggaacttgcaaaagattttaactggtcagctgcacagatcaaatactcactagaccgaatggagaaacagggatatatcaaattgcaccgtcttccacaaaaaagagggttcatcgtcaccatacttcattatgcggactacatacagctaggaaattacatgaagaaaaaagctttggaaccagctgagattgaacatcaggaggtcgatgacaaaatgaaaaatgcctttgagctatatgaaaacaaagttgctcggtcagtcggtcctatagaggcacagcgaattggatacatggtcgacgattatggtgaagaaaaagtgatggaggctatcaagacagcgtttcagctaaaggggaaatcagcaagtttgtcatatgttcaagccatcttatcaaatccattcactcaaaagagaaaggagaaacaatatggctataaacaaagcagtcagtatagacaccgcatttcaaacgatcatgcaggaacttcgggaaaagtcagcccgctttttgggaacaaaacaggccgcatccgtagaaaaggctgaatttaattgtccttattgtaatgatcgtggaattgtcgtttatcgggtccataaagatactccttggcatttagatgaacagttagatcttatggttccagacgaaatggtactcgaagatgattttcttttggggaaggtttgcacgccggacaaagctagtgaatggaaagatacttattcaaaacagtgtgaatgtgtgagacgaaagaaaatagccagactcatgtcagctagtggcattacagaagagtttgaaaagcttctctttggtaacttcatcacggacggtaagccagacatgatcaaggacgcctatgaatgtgcagtggaatactataaagattttcaaaaaatcaaaggagaacggcaaaacagtatcgcattacttggacagccaggtagcggtaaaactcatttgctcacggcgataatgaataatctgatcaagaaaaaatcagtacactgcatgtatttcccttatgtagagggcatgggtgatttgaaagctaactttgataacttagaagcgaaactcgatgccatgagaaagatcgaagttctattcattgatgacttatttaaaccaataaacggtcatccaagggcaaccgattggcaggttgaacaaatacagtcagttttaaattatcgatatttgaatcacaagcctttgctgatttcttcggagttaacaatcgatgagattttggatatagacgaggctcttggttcacgaattcaccagatgtgccgtgattacatagtgattattaaaggcgatcgaatgcaattaaatcataggttaggtgattgggaatgaaaaagaaaacgaatataaaagcagctgatggactttatatattcggacctctaagtcctacagaaggtaaagatcttacgccaactatccgtttacttgaggaaaaaataaagcaaatggagcggatgctgagtgcttaaagcagtcgtgtctctgctggcaattttactctcggcatcgagaatagaaaaagaaattgagctatgggaacagcttgacgggaggtaaagaacagttggattgcattaagttcactgtttatggagagccagtcgcacaaggacggccgcgtggatcaatacgaaatgggaaggtgcatatgcgagatccagcgaaatcaaagtattttaaacagtatgtagcattggttgcatctcagcatcgcccagaaacgatcattactggtcctgtctcaatggatgtcaaagtgtacagaccgatgcctaagtcagtttcaaactcaaaaaagaagaaagaaaaagctgaaaagggtcttctacggccgactacaaagcccgacgttgataattatgtaaagggtgtaaaagacgctctgaaccatcttatttataaagatgatagtcaggtggttgacctgaaagtcagcaagttttatagcgaagagccgagggtggagttcaagataaaagaggtttctgcctaaaaataaaaaacaccgaagcgcttagcctcagtgttcttgatatgaactggtacttctatcataacacagggggcgctttgagtgtacaatccaagagaaataaacatcaaaaaagacttcactattcagcagaagattgatccaggaaaagttcagattatcgttttagatgggaatcagggaactgctcatgtcttagatgctccggtacacggtaaaacggttattcaaactgtaaaggggagctttgcgcgggttgatcatgagataggatacaaagtcaggtaagttattgaaggggtggctacttaggcattgcagtgtttttttattctacaggattgcggttctgcgggagataggagacgaattctttaaatttcatacaacaaccttaattgatttcaactaaaatttagtatatttttaagaaggaatttttacatgaattgcatatatacttttagtatagaaattttaagtttataaaaggtgatactatgtacaagttaaaagacatagatctaaggagaagcctcttagatgtattatatacagaatgtgaaaatgaacaagatactcgcattgtaaatgaaatgggtatactttatggaaagtctagagtggatgtggcggttattaatgggattagacatggttatgaaataaaaagtgaaagtgacacattaataagattgccgtctcaaatctctcactataacttggtttttaataggatgacaatagtcgtttctaaaaattaccttgatcaagtaaaggagttagttcctaaatggtggggaattattgttgtttataataataaaggaattccgcgacttaaaagggttaggaagggaagggaaaataagaaattagatcctatgtcaatctcgcagttattatggaaagaagaagcattagacattctgaaagaaaagggtttacaaagaggttatctaagtaaacccaagaatgcgatattgaactatttagcagaatcactggggttagaggaacttcaacaggaagttaactctaaattgaaacaacgagagaactggataactgggaagcaacatattcaaggtgatgatttacatttacagtaacccaagaggttgggtttcctctagaactttcagggttagtagcgcgttcatatatgaaattatcgccataggagaaggctgcacccatgtatgctggattagatataacatcctgcgctaaagctttggtttgaccaaagccttctccacttgctttaacacctgatcctctataaattaaaaattctgattttgtggtgtatttaattgctggagccatgtccattattcttgggtcaaaatcagtagaagtcatagggttagtgattgtataatcaccgaaacttgggattcttgcgagatttagttttaaaagtctttgataagttagccattcaactctcggaattgaaccgttatttttagtcggaacttttttacttaactgcacagggaaggaggtaccgcaaaatgtaatggttctccaactatttaatttggggaaattaagtaaaatttgaattaactcatctactacttgatcaactgatctggttgaaatatctttaaaatctaaaataatgtctacattttcttcggttagaccgaaatattcaagttcatcagttatatcagaagataatgtttgtaaatcacttaaatcatcgggagttaatctgatacaaagacctcttttatactgatctattaactcctttaaaacaatgtcgtattgttcttcagtattgtatctatagaaactatacacgggtatacaatgagttcctgccatttctactgatgagacgatatattttaaagggtgaacgtctccgtcaataaaagtatcattttcgacactagaatatagagaatcaacatctacaaaaattgggtcttcttttgaccacgactcttcaatactttgctgaaatccagataggtggtcctcaatagttttgtttttgtcgggtgattgaatttctaataaaggtgttatgtcttgtttgcgatgtaggtgtttaagtgcgtttctttcgccttttttccattttaaaacaggtacatagtgcttttcgtcaaacatgttataacctccattttgtttaggataaaagtaatacgataaaggaagaaataggtttcaaaaaaattcaaaaaattagattgtccaagatggaaagcctgcggacactgaactacagcatttacgctgttggtttggtgtccgtttttatttgtttaaaaaggaggacgttttatgaatcgaaaagaaattgaaaatctaatcaatagctatcattggatggtgaaagaggttcgtcgtttgcagagggtactctatggttcagtaattccaatgaagaattggggggttgctcaatatggattagaagctactatgccaaaaggaagtcctgggaagagtcaggctgaattgcggcaaatggatatgagagaggaacgtcttttcaagcgtcttaagtattatgaagagcgagtatatgcagtggagttaggggctgaaaaaatcaaaggagagcaacacaaagttatttatgattgcatgatggaggggatgagctaccgtgctattggtcttcaccttggcatttcacgggaaactgtacgaaaaatgaaagatgaattgatcagccaattatgccaagattgccactttgagcgtttgttgaatctgaaaaaatctgtagtgtaaaatgggaggcaggtcggtgcggcaggttctccgattaccacaatacaaaatatagtgagaaagaaagcaactatcacatagaagggaaatcttctttcttgtcgaaataaaaggagatttggaggtattgttgtgataaatagggaaaaggaatttagaaacgctttttattttatgaaaagatatgtgaaatctccactaactcctagttatacaagaggttatagtgcaggtcttgcagataaagaaccagcaaaaaaaatatatgattacatattgttattagggaaagattcatctaaaagttttgaagaaaaagtgaatttattagttgcatatttggaaaaggcagaacaagaagaacagggtaagcattatatgggcacaggattttatagaactcttcaatcctatattaaaaggtcgagaagtaatattgaaaaaggaaaacctgttcaaacaaggagatattagtctgcattttgatcgacaaaaattgcaaatggttcctttgtcaacctccttaaccgataataaggtgggaggtgagaacattggctgaacaaagtggatattatatttcagatagaaacaatgaatactctaaaatactcaacactttagaacattcgttacaaatagcaaagaataataataatattgtgttgggcgagtctaagagaagcttttgaatgaactaaaagagaatcaaggacaaaaccttgctccttggcatttcatttggattatgcaagtattacttgattatgtccctgacgaagttaagggcaattaattcaagcatccttcggggtgcttttttaatttgcactgtaaaccatgaccattgtatctcagaagaaattattggcggctcagcttttgagaatgggctggtttagagagaattaaaggagtttttattcgacaaattctgcaaaatgttctttgtcaaagtattttgccgatattaagataggaggtgaaaacatgacaagaacaattaatgtcaaccagcaacatttacttgaacaactagcaggcggttcggtaaaccgtcagtgcacaatagaagctctaattgatattctcatcgataaaaaggtatttactgaagaagaatttgttaaataccaaatgcatcatttagaacattcagcagatgagcattctgcggagcttttagggatcagtaaggaagattacataaagagcaaacaataaagcatcctaagggatgctttattgttcaagtattgcatgattttttggaaacaaatcagttgaattagacaactatttccgttggtcgatcgggaattaatatgacatagatcagttcaagattgcgattttatgcgagggaaatagattataggattaatcagttttcctatattgacttaaattcatcaatttgaatcccgatatagaactggggtgataaaatgagaaagttttataagtccaaatatgttattcagtatttggactcaataaaaattgacggaaaaaaagttaaaaaagtctataatgagaatttttcaaccagagaaaaatataaagaacaggtaatctcttctttaggtgaaaaagagattaaaacctcgattaatatattagaagatgagatttcaattaataaagatacgaatctttggcatacatcatactttgtattaaatggtgttataattactctttattttaatgtttttaacaattttttgcctaaaacagctggtaatatcgctcttgtgggtgttatgtttttaatcattttaatgtacataagttggatgttattgagctttaaaaacaaaaacgatgtaactcaatattatggttataaaagaatcttggaagaatgcttaaagaaaattgaagaagaaatgaaattagatgaaagaaaaaatggtgaataactgatgttttgggctatttttatggattatagatcaattgctgtataaggaagcgtttctttgaagatatcacatggcagagcaaattaacttagaatggacacctacggcgtccataattgattatttgtgttccaataaaaaggtggatagtgcttctattatttctggcgttttctcaacgtcgaattctggcccttgttttagttgtttaccgtgggttctaatatttattctaagacaaggttttttaagaaatccttcttcgacataagtaattcgtaagctctccttatctctttgggtttcgatttctatatatttttgacccttactatccacatccctgatcatcaaagacactccctttaaaaaatggaaataacaatgaagatagtaacagaaaaggtggatgttagcaatatgatagtaagtgtgtaattaacctatggtctctgttttataaagatgatgaggaatattgatccattattccctaatgatgcataatgttattaaaaagctgtgagggagataaaaatggttaatttgattaataatagagaagagtttttcgataagtatagaattaaagaggaagaatttgaggatacagggcttgattggagtaccttgaaagaaatatatgatgattatcttgaaagtttcaatttactaaaaagtacaggtgaaacaatagcaaacattttgagaactcatcaattagctcattctgtaaggatgagaataaaagatcctgaacatcttattgaaaaattaatcaggaaaaaaatcgagaaaaaagatgacttcacttttaatattaatgattataaagaaaaaattacagaccttatagggcttagagttttacatctttctaaaggagatgctttttatattgatacatttataaagaaaaattggatattacatgaaccagttactatcaattatagagaaggagatttcaataaagaagacatatctgctatagaagagcaggaagatattcgtttgaaagaacatcctgcaggttatcgatcttggcattatttgattgaaacaaacgtaactaaagaaaggtatattgcagaaattcaggttaggacaatatttgaagaaggttggagcgaaattgatcattggcttcgttatccttactatttagataatgagatattaaataaccaattgatggtgttgaataggctggcaggtagtgcggatgaaatggttaactcgattttagagactagggaacagcttgataaattgataaaagaaaacgaaaaatcaaaagaagagatttttcaattgcgtaaaaaaatacaagaaatggatgcggaacaagaggagaaagactctttgattgaaagtttagataaaattgaagataaaacggtttcagtgtctaactcaggtttaaagaataaatatgcaccttacataagcccaatgccaagttccatagcatcgatggtgagtcgatatcaaaatcaagttccgagttccatagcatcaatgatgagtcgatatcaaaatcaagttccgagttccatagcatcaatgatgagtcgatatcaaaatcaagttccaagttccatagcatcgatgatgagtcgatatcaaaatcaaattcctagttctatttcgacaatggtgaggggagaacagaaccctgtggctggtacaatagttaatgatacaaaattgtcaacgaactccaataatcttagtaacgaaaatgatcaaaaagttaaggaagtagagtaaaacaaacacaaactcaaacatgatatctggaggtgggtgagatgtaatgccaagaccacgtgatccacgcagagatgaagcttttcgtttgtggaaagagagctgcgggagcaagaaattaaaagacattgctgaggaattaggtatcacaagcagcactattcgcaaatggaaagcaaacgataaatgggaagaaaaaataaaagggagcgctcctaaatcgaaagggagcgctcttttacgtcgaggcgcacctaaaggaaacaaaaacgcaattggaaataagggaggaagggcaccgcttggtaataaaaatgcaatagggaataaaggcggtgctgctccactaagaaatcaaaacgctgtgactcatggattcttctcaaagttcctgccagaagaaacgctatcgatcatggaagggatacaggagcgatcccctgtcgatatgatatgggatcagatacagatccaatatgccgcgattattagagcgcaaaagatcatgttcgtttctgataaggaagaaataattaaagaattgaaaaagaaaaaggctgtcctatctgagacaaacgaagttgaagaggaagagtatgaattccaattttcttgggatcgtcatgcaacgttcttgaacgctcaatctcgggcaatggcagagcttaggaacctaataaaacagtttgatgagttagctcattccgaagacgaacgacgtcttaaattggagcatatgcgtttaaaaatcaacaagaaaaaattagagattgaagaacttacagaagaagataaaccttttgaaatcaccattgtgaacaaaggtgatgacagtgattaaacaggtaaaccctcattttaaagaatttctttttgactggaatcaaaagtttcagtttcttgttggtggttatgggtcatccaaaagttatcatgttgctttgaagattgttctgaaattgcttatagaaaagcgtactgcacttattatcagagaagtgtacgacacacatagggattccacattttctctttttgatgaaattgtaagtgatctgaaattagatcatatcgttaggtgtgtatcttcgcccatgcagattttattttcaaatggcagccgcatcatctttaaagggatggataagccagccaaactgaaatcaatcaataatatttcactcatttggattgaggaatgttcagaagtgaagtatgagggattcaaggagctgttaggacgtcttcgtcacccgacattgccgcttcacatgatactttcaacaaatccagttggagaggacaattggatttttaaacatttctttaaagatgatcgagagaagcggtttgtactcgatgataaggagctttatgaaaagcggataatcgttagcaacgacacctattatcatcactcaacggcagatgataatctttttctgccagaaagctatgttcagcaacttgaagaattgaagacatacgatccagatctttaccgaattgcgcggaaaggtcattttggcgtgaatggaattcgagtactaccgcagtttgaagaacggccacatgaagaggttatgactgcaatctctaatattaaccgtccacttaaacgagttggcatggactttggttttgttgagtcgtataacgctgttgttagggttgctgtagatcatgagaagaaatatctctatatctactgggagtattacaaaaatggactaacggacgataaggtggccgaagaactcaaggaatttgtagagactaacgaattaatcaaagcggattctgcagagccaaagacaatccgttattttcaacaacacggtttcaatatggtgggggcccgtaagtaccaaggatcacgcctccaatacacaaagaagatcaaacggttcaggaagattatttgctctgatcgttgcgagtacacgatttatgaacttaaaccgctcacttatgctactgataagctggggaacatcatagaagacgagttcacgatagacccgcatacactgtcagctatctggtacgctctcgatgattatgaggtaaccgatttgaaagaagaatctaaaggaagaccacaaagatcaagaccaggaaggaggtaaagcatgtcaaaacaatctgttaaagcacgagtggtcaaagcctctccacctactgaatcgactaaacaaatttatgaggatgaatttgcggacagttatgacagcaatattttaccgcctccgtataatcttaaagaattaaagatgattgctgagtattcaacgatcttacagcaatgtgttgatgcctacaggacaaatattgtgggttttggatttgattttgagtactcgtttgatgtgaattcgccagatgtgacaaatgaagaaaaaacagaagctgaaagtgaatggacaaagcttgaagaattcattaaataccttcactttgatgagtcagctgagactttacttggttttgttattgaagatcgagaaaagacagggaatggatttatcgaggtcattcgaaacggtgaaaataagccagccggcattgaatacatggatgttcaaaatgttcgggtttgtaaattgtctgaaccaattgaagttgattttacatacttcgaacaaggacaaatgaaatcaatcaaaagagagaaacgattccgaaagtatgttcagatgattgacggccgtatggtttactttaaggaatatggtgatccccgtactttaaatttagagacaggtcaatatgatgaacagactccattcgagaaacgagcaaatgaagtggtccatttcaaaataggaagcggtacttatgggaaaccacggtggattggccatattgttaatctgtacggggctcgaaaagctgaagagctgaactttatgtacttcaaacaaggtagacatattcccgctgccatcacaattgaaaatggtatgttatcagaggactcatacacacaattacaggattacatgaatgggctagaaggggtggaaaatgctcataagtttcttttacttgaagcggaaggcatagcgaaggggacaaacattcatggcgatgaagagattgctccagtgaaagtcgatattaagtcacttgctgaaatccttcaagaggatgccttgtttcttgaatatgaccaaaagagccgagacaaaattagatcggcttttcgtttgcctccactttatacaggtgaagctcaagattacaacagagcaacggctgatacagccagaaagattactgaagaacaggtctttcagcctgaacgaaagttaatcacaggaaagctgaataccctatttttgaatgacctagaaattcacaaagtccgtcttcaactaaaagggccagactttagagatccacttgagattgctaaagttttaacaccgtttataacagctggtgcagtttctccgaatgatctacgtgatctggctggacgggtgctcgggaagacgcttgaagaatggccagaggaagaatacaataggccgcttggtaagactaatgagtcgtccgcttccgatcctttggctacgctgtttaaatctaagaccggtactcctgatatgatcgggttattaaaagatatgcgggatgttctggaggatctgaagagatgaacaaaacggataagctgttggagagtctgaacgcattcattctaaaagccgaggaaaatcagtataagcacttgggggagatggtacctgactttcctggcaaacttaatatccccaaatatgtggaggaatatgaaaaaggcatcgctagattactcaggcgccagcgtaaaaagtttttagatggtctgaatagttttataagcaaagactcaaaagaaacgttagaagctcttttggtgttttttactcagaacctttttgcggaggatgatttcgaggaagaatttcaggaactgaccgagggattcttgcagcagactattgaagagctggccgtagtcatcatggactctatagatccagaagttccttttaaagtcttatccaatcgtacgactaattggattaagggatggtctgagaaactggctcagatcatgaagttaaacactcatgaagcggtggagaccgtgctaactaacgctatcgagaacggttcatccatacaagacattgagctgacgcttaaagacatgcctcaatttgatagggagcgggctcgcacaacggctattactgaagtacttgcggcatcctcagccgcgcagcatgaatcatatgtacagtcgccagcagtaaagaaaaagaagtggcggcacagcggagagaagaaaaacaacccacgtgagaatcatatcgatcttgacggcacagtaattggagtagatgaagaatttcagataccaggcagtagagagacctgcatgttcccccgggattctaaactatcagctggtgaaagagttcgttgtcattgtgttctgtcacctgtggtagataacgagattttaggattgtcagctgaggaaaaagaaaagattagaagagaagccttagcaaacatggaataaaatagtataatttcctcattactttaagaaatgagggaaagagatgaatttgttcgagtttttatcttcattagcatggcctgtagttgtttttatagcaattttaaagctacagaatcctttatctaacttaattagtacactggctaaaattaagtataaagattgggaatttgaatttctattggataggaaaataggtgaaattgagaaagttgtagattctaatatcgcagtaacagaaaaaaagatatctattcctgtggttaataacaaagtaaagcaaagagagaaaaaatggtttaattttatgacacgaaaagatcgatatatttctatatacaaatgtgaagaagaactgttttctgctgtgtacaaattattcaaaatgacgaatatagatgaaacgaatgataatcttaatgaggatcttaatatacaacatatgattaataacctgattagtaaggaatttatttcaaaagatttagggcaagctatattaaatgcccatagcatactccctactttatctattgcaaatgaagttcctggctttttactgaacaaatatcttgagaattttaaggggattatatctatattagaaaataaaattgcaggattagaagcaaaagagtcttcttaataatagatgctttttgaaaggaggtgaataatgcaatgcctcgagaattactaaacgcaaaaatcacacatgtatcttatgtagacaaggctgctaatcaaaagcagttcttttttatgaaatcagaaaaacagccggactttcaaaaggaagtcaaggtccttgcgaaagaagcagatgagcagaaacttgtttatggaatcgtatatgaaccagatacagtggacgcccacggggatttcatgacagctgcagaaatcgaaaaagccgctcatggattcctgaaagatgcccgtgaaattgataagcagcatgactttcagggcggtgtcggggcagtggtagaatcctatgttgcacctgctgactttgacatgaatggggaaaccatcaaaaaaggttcatgggtcctcgttaccaaagcttctgatgaagtttgggaacaaataaaaaaaggtgaaattaccggttattccatggctggtaccgctgagacaattgaaaaacaagaagaaaagcccatttctcaagagaaaacagatgagaaagggctttttaatttgctcaaaaacttttttgttggaaaacaacatcaatcatatgaagagccggttgaaaaggcgggcagaaagttttctgcttcaaacctgcaagaaattaagaatgctcatgcagcccttggtaatttactgagtcaggtagaaacaaaagaggaggaagaagaaatgacttcggaggaagtaacgaaatccattcaagaagcattagagccaattaagaaacgtctcgagacattggaaaaagaggaagagcttaaaaagaaagataaagaaaaaacagaagaagaggttgaaaaagagggcgagaagttgaaaaaggcaatttcagaagctgttcaaccgctcgttgatcggattgaagcaatcgaaaaaagccggggaacatctaagcaaactgaagaatcggggtctgaacaagttcaaaaatcaatctggtcagggttgttttaatgtataaggaggatacgaatgagaaatcaagaggttattaataaagcagaaatgacgctttctactttagagagcggtgggattatgaatcctactcaagcttcaacttttattcgaatggttcaagatacgccaactattttaagagatgcgcgagttattcaaatggatcatgacacacagaaaatcgagaagatcggttttggtcagcgtattttaagagcggcccaagagggagtggcgctaactaaggatcaaaaatcagttccatcaactagcacagttaacttaagtacaaaagaagtaattgctgaagttaacattacctatgacacacttgaaaacaacatcgaaaaagatggccttcagaatacaatcatgcaaatgatagctgaacgtgctgcagttgatattgaagagttgcttgtaaatggagatacatcttcatccgactcatatcttgcacaattagatggcatcagaaaacaagctacatctcacattgttgatgctgcaggtgaggaactgacacggcagacgttcaagcgaggatataaagctgtacctcctaaatatttgcgaattccgcaggagttccgtttttatacatcgcctggtattgaggttgaatggaaagatcgtgtagcggatcgtcaaacggacttaggggatgcagctgttcaaggtggtctttcttctgcgtttggtgttccggtcaaaggtattgcgaatttacaaccttatacgattggagaaggagatacagccacagatgtttctgatatcatccttactcatccgaagaatattattcttggattctctcgtaacattcggattgaagtagataaggacatccgtcgccgtatgtttatcattgttttgacagcgaaattggatagtgtttttgaagaagaagacgcagtagccaagattgtgaaagtgaaggagtaggtggtctggcgtgtatactgcaaagcttattaaaggcaaaacatataatgtcatgggagttacctttcgagcaggtgccagtctagcagtaccaaaaaagctctatgagtatttaaatgaaaatccatattttgtactaaatcaacagcttaaaaatcaaaaggatgatccgataaattatactgaatcggaattgaaaggtatgaataaagcagagcatgaatccattatttctaatcttggtggcaatccgtctgacttcaaaaacgcagatgaaagaattgcctacatccttaacaaaatagataacaaaggggagtgaccttatgctgctaatcactcccgatgaattaaagagttattcagtttttgagtctgtaaagaccagacctgacgagttgttaaaacaggatatacttgaggctactgctgatatcattctcaaagttggacatgatttttcagatgcagagtatattcctttgcctgaaacggttcgactggccctattaaagttgtctcagttttatgctcttataaatggcgacgagtcaattattaaaggatatacaactgaaaaaattggtgattattcttatactctaggggatggcagttctcttcaaaaacctgatgtgtatgcattaataaaagattatgtaaaaccgggtgaccctgatttagaaggggttgaagcgaaagtgcggatgagatcaatatgagttatcgatctttactgactcacagatgtgacatttaccatctgcaggagaaaaaagaaaatagaaagcaaaaattcggtgtgccggttgaagatgttcaaccggttttttcgtaccctgatgagccggacatagaaaatcagccgtgttattttacagaaaagagtcagtccattatccaacaggaaccgaatgtagctatttatcaatcattccttgtgcatttccctgctactgctgatattcgagtaaatgacagggcggtttgggatgggactgcttataaattacagaagccccgcaaaatcaggaatcatcattgggaagtgacggcagtacgggaggttgaatatctgtgaagataaaaggtcttgatcagttcattcaatcattaaaccgtgcttctcgtggaggattgaaagggaagtacgaggagtggcttgaagctattggttttgagttcctagacattatccaagatcaaattatcaggacgaagacggtagacacacgccgcttgcttaattcctttcagaaaggtgaccaggataatatcttttcaatgacaaaaggcagcttaaagttggatgttggaacaaatctggaatacgcctcatacgtgaatgacgggcactttactatcgatccgtctaaaaatcaggatagacgatgggtcccagggcggtggaaaggcgaccgtttcgagtatgaccctgctgaaagaaaaaccggaatgttgctgaagttccaatgggtcgacggttctggcttttgggataacgccatggctatatttcagttgatgtttgagagaagccttgagcggaagctgcagcaatggattgatgaagaattttaaggcggtgatgccatgaataaagaagtaggttcaattatgggctatctatacaaactgtatcctgttcaagtgtatgaagaagaaataccgcaggactttgctgttccgtctctttactttccaccggcttccacggtcgatgggacggacacagtatctacgtttcagaaagcctatgttttaaacgtgaaactatttcacgagaacgcacagaaggctcataacgaagcggaacgaattgcggatacacttagaagcagaaggggcataattccgcttatacaagaatctggcgaggatacgggggattttattcgcctatctcgaatagaaacgcgggtatcagatgattacgcgaccattgtcttaaactggacgagccgctattggtatgagcgggaagaacagcgttcaatggatggttttaaatttaaaagtggggtgaaatgatggccactaaaaaagagaaagcagaaaatgctttttatattaaggatttgcgagagcacagtcgagagctctttggggtaaaacccgaggtgtttgacggtgctctttttcatgttcataaaacaagtattacaaaatcggaagcgaagaagttgattactcagtttcttcaaaaggaggtcaaatagatgaacggggggactttcacgcccggtaaggaaaaagagcgtgccggtatttactttaacttcaaaacgaccgcggaaaaccgtgtttctgcaggagaacgtggaacagttgcactgccgatagcgtccagctggggtgaggttaagaaattcatttctatttcttcaattgaggacctgaataaaaaagtggggttgaacattgatgatccttcgctgttgcttttacgtgaggctttgaagaaggcgaatacagtcttgctttatcgcttgacggaaggtcttcgtgcttcagcagacatcagcgaaggtgtaaaagctactgctctttatggcggcacaaagggtaatgacatcattatcagcattacagaaaacgttattgactcttcaaaagtcgatgtcactacctaccttgatcagtcagaagttgataaacaaacagtttctaaagctgaagagcttaaacaaaataactatgtcacgtttacagggaaaggggatttaacagtcactattccgttaaccggtacggctcctgaagacgtaagcggtgctcttccggcatcttccggagtccgcttgtcaggtggaacagacaaaacaccgaccaatgctgattatacagctttcttggaagcggctgaaacggaatactttgacacaatcgctttacctgtagaggataacgagcaattaaaagcaacgtttgttgcgtttatcaaacggctgagagacaaccaagggcaaaaggttcaaggtgttctttcaaattacaagggagaccatgagggtattatcaatgtaactggtggcgtcctacttgaagatggaacggagatcactcctgaaaaagctacggcttgggttgccggcgcaagtgcgggggctacatttaatcaatcacttacatttgtagaatatgagggagctgtagacgtccttaaccgaattgacaacgacgaaatcgttgaacgattgtcaaatggggaattcttgtttacttatgattctcgtgataaatcagtatcggttgaaaaggacattaattcactcacaagcctaacagcagagaaaaataagatgttccagaaaaacaaaattgtccgtgtacttgatgcaatcaataatgatgtgacatctcaattgaaagcattgatcaagtctcgaaaagcgagcggcagtgatgttcccgctacaaatgacggactgcagtttgtaaaaacgctgattactcaatacttgagtgttcttcaagataacgggggcattactgattttgattcagagaatgacattacaattgctctgaataatgatcgtgacggctttctgattgatcttgcagttcaaccggtggatgcagctgaaaaattctactttaatgttgaggtgaaataagaatggcattaaaagcgcaaaataccatctcgggtaaagagggcagactgtttcttgatggagaagaaatggctcatatcaaaacgtttgaagccaatgtggagaaaaataaatccgaggtaaatatcatgggccgtaggatgacggggcacaaaacgactggagcaaatggaacgggaacggccactttttataaagtgacttctcaatttgttcttattatgatggattatgtaaaaaagggaaacgatccttatttcaccttacaagctgttctggatgacgcctcttctggtcgtggcactgaacgagtcaccttgtatgatgtgaactttgattctgcgaaaatcgctgggcttgatgttgattcagaagcattagaggaagaggtaccgtttacctttgaggattttgatgtgcctgaacagttaaaatccacattctaatcactttcacgaaaaatcgtgaaaccatcacgagatattcacgaaaaaatatggtaagattactttagaagtaattcaactgaacaagtttcatatagaaacatgtatttctttcaaaagaaatgcataaaataaaaaaataccggagtgctgcaacactccggcccgtacaaatgctggctcctcattggagcgctggctataggtgtatttagatatggacctaccctagaagtttctcaggcctcaaagggtggtctatttctttttgtctatatacgtcaacaaggcgagaataaacattcccgttccaagcattaaactaagcgcttgaaatgtcgacataggcgtcaccccctttcaggggatttagccagcagaccacctttgagttagccgtgcaaatgtacaggaataattatacactagacaaccatttttgtggttgtcttttttgttggcttaaatcgattgaatttaattttaaaggagttaatgtacatgagcgaaaaacaaaacaaaaaggtatacgatctttcattctttatgccgggacaaacaattgaagctgaggaagtgaaagtaccgatttctaaacgatttgtagacaaagaaggcaatgttgttccattcattttcaaagccattacgactgaacgaattgatgagctggagaaagagaatacgacttacaagaatgtaaaaggccgcggccgtgtgaaggacttggacagccaacgcttttatgctcgtattgcggttgaaacgactgtttaccctaactttaaagctaaggaactacgtgaggcttacaaaacagaagatccggtggaagttgcaaaacgtgttctttcagttggcggtgaatatgcaaattggctaaacaaagcaattgaaatcaacggttttgatgatgatctcgaagaccttgaagaagcagcaaaaaactagtaaaagacggggacaaagaggctgtatatctttactatgctatgcatgagctcaaatacgccccgtcagaattaagagaactatatgaggctccgaaagcattcaaggcgctcttatatgggttaatcggttttaagcttgagctgttagaaaaagaagcgaagaagggaggtaattaactatggctaaactaacagccacgtttgaattacatgataagatttcccgcaagcttcgaatgatacaaggcaatgctgaaagacttaagagggctgctaatggccctcttatttttgaggctgaagaccggactgagagagttatgcggcggattgaccgatcggccaaacgtttgaccgaacgggctcgatcgcttgaagtggatttagatgatcgagcttcgaatggcttacattctatacgtcagcaagctgaggatcttaccgagggcagtcatgaggtgacggtttccgtaaatgatcaagctacaccacgttttcgtttaatccgtggaggtctctctgatttgaatcggtcgcacgctgagccaactgtttcagttcgtgatcatgcttcaaaccagttagatgagatccgtcgtcatgtgtccgatgtagatagcgaacatgcagagccaactgtttctattaaggatagagcttcagcggctctagatgcaattgaagcgaaaatagacagcttaaaggatgctaccattactctggcagttgcaggtggtttttctgcaggttcaattatgggttcaggtaaaagtacaatgtctcaggatgcttatgtgtcagcaacttcaaacgttaataagaaagatgttgcaagaatgacggatcagatctatttcaacaataaagtgggcagttctcgggaagaagtcagtttatctttgagaaacttatcgcaacagacaggggcgtctaaaaaagctcttgctgaattgactgagtcgtcaagtaagattgcccagctcatgaatgctgatcaggcagaggtagatcgagctttcagttcaatgtataacaacttgaaattgtccgggaaacaaagcggagacttaattgcttatgtatatcggaatgcaggtgaccaggctgatgatttattagacacaatgaatgaatacagttccacctttaaagacttgaagctcacaggcggccaaattgcaaacgccatgataaaaggaacaaagggtggcgccagaaacttcgataacctagccgatagtatgcgtgagtttaacatccgccgaaccgaaatgtctgatagccaagtggacgcatttaaaacgctgttcggagccaaggaaactaagaaaatgttcaagggcttcaaagatggttcaataagcggagaggaaagtttatttagggtggcaaaagccctttctaaagtgaaagataaaacaaagcgggctgctattgcgactgagcttattggaacacaatacgaagaccttaaacagcccattttagatatggctgagggaattggtacaagtgccaaaacaagcggtgaattagaacgaagctttacgaaacttcgggataataacccgatgacaccggttaatgatgccatgagagattttgaaagcatatctaaggatatgggaacttctctgctaactggattagggccagcctttgataaaatcagctcgttcattaacagtaaagaaggtcaggaaaaacttaaagagatcaaaaaagatattgccgatcttggtgaggagataggtgataagttaaacgtagccattgagtggggcgtcaaccattgggatgatttgaaaacagcgattaaagttgtgatcccttctttaattggattgattggttatttgaaaatactccgtccgttgttaaaaggcataggtactgtcggaagtgatgcagcaggcgtaatccgaaagctaattccaaaacgtactcctgaagctgccgctaacacgcgaagtgaaaggaggaacagaaacagtaatcgtaatcccagcactaggagcagagaatccaaaactgccacaagtccaacgagtttacctcgaagcggcagcttaacatgttgctgttgtagcgatggaggtaaaaatgatcgcattcgtggaagacgagggaaaagagttttaggtcgacgtggtaattcaacccgaatgaacccttctgacagatcaattactgtgtcatctggacaaatggagagaaggcgttccagtagaactgtgggtactaatccaaccagaggatcaagatcagcaataaccacaactagaacggagctatactcagctggtagaggtgcaggcagtacatcgaagttcgggaaattctttagccctctgaaaagtgttggcaagtttgcaaagggagtccctctattaggaacagcgttagcggcaacagatttaattgggatgaataaagacaatgttggtgaaaaaattggatcagctggcggtggtcttgctggagcggctacaggagcagctattggcagcgtagttcctggagtgggaacagccattgggggaatagttggtggtatagcaggcaccatgggtggttcaagtttaggtaaagcgtttgatggttcagaaataaagaagaaactaaacagtacattatttgatcaaaaatggtggtctgaaaaatggtccggcattaagagtaatgcgaagacttctctcaatgggttaagtgatacatggtctcatgtaaaagaaaaggtaaagtccactttatttaatagtgaatggtggtctgaaaagtggtctggtgttaaaagctgggcacaggacaaatggaatagtgcatcatctgtttgggagtccgtaaagggaaaaataaaatccactttatttagtgagaagtggtggtcaggaaagtgggaaggcgtaaaaggttgggctcaaagtaaatgggacagcgcgtcttctgtttggcaatctgttaaaggaaagctgaaatccactctatttagcgagaagtggtggtcaggaaaatgggaaagtgtaaaaagctggtccaaaaataaatgggacaatgctaaatcaatatggaaaagtgttaagagttccatctcagaaaccctttttagtaagaagtggtggtctgaaaagtggcagagtgtaaaggaattgggaagcagtattttaggcggggtaaaagaagttggtggtaaagtagcttcaagtgcgaaaaaaactgctggtaaagcgtggggatatgtgaagagtggcgtaaattatttatttggttcgggaaaagaaaagccaaagaaacatgctactggtggttacattacgaagccaacaatatcttggattggtgaagctggtaaagaattcgttatccctgttgagaataataaaggtcgcggcaaaatgctcctttctcaagctgcttcgaaattagggatgagtgtggttgatgatatagcgtctgcttcatctgcaggaggtgaaccggcaacttccccgctagtccgtagtgcggcggtgactgcttctgtatctcctattattgacacatccagtcttgatgaacaagcaacatcatttggtcaacagttcacgaagagctttgatcaaggaattagagataatgttgtttctatggaagcatggaaacagaaaaacgttggacaaccaatgaacaatttaatctcttattctccgaattacggaaagcaagtggtcaatggttatgctaaaggtcaaaacagcacttcgaccggtacagatggcttcttgcagacgaaggttaaaatgccatttcagaacactgttaataaatcttcatcatggggaagcggaacgatcaaaggttttgcttccggacaaaatagctcacaaactggtactgatcaatacgtcagcactcatattaacaagccgtttatccgctctaaagaatcatcaaacggctggggaagcggtatggtcggtaattttgtttctggcatgacttctaaggcaagtgaagtccatgaagctgccaaggaactggcgaaaaaagttgagaaggcatttcgtgaagagcttgatattcattcaccttcccgtgtcatgatgagtctcggtcgttttgcctctattggtattgtaaaaggtctggattcagttgatgtgaaaaagtttgctgaaaaacaagcaggttcactagctgctgcttattccggaatgggagcagtaagcggaaatgtgaagcaatggcttatggccgctatcatggccacaaagacaccaatgagctggctcccagggctgatgacaattgctcagcatgagtcaggcggtaatccgaaggcaatcaacttatgggatagtaatgcgaaagcaggacatccatctcaggggctcatgcagacaatcccaagtactttcaacgcacataaattgccgggaatgaataatattcttaacccgatacacaacgctactgctgcgattggctatatcaaaagcagatatggatcaattaataatgtaccaggcattataagcatgaggcacggaggtccatatgttggctacgctaacggcggacttattaccaaagagcagattgcacgtgtcggtgaaggaaacaaacgggaatggatcattccagaggagcgaggtatccgtggacgttatctgttagcacaagcagctaaggcactcggaatggaagtaacagacccatctaaaaacgggcaaactgaattatcttccggtcaggtaacagctgccacaacgggccgtaatcaaacaacgtttacagctgcaggtggcaaagaggtcattattcagtttaatggcgatcagcattttcacaatgaccaagacatgaacagtcttgtagctaagattaagcaggcccttgtcgatgagcttgaacaggatatcaacattggaacgaagggagtcgttgcttttgactaaatccatatatgaattttggatttcacaagggaaggacaagctgcggcttccggtccttcctgaacaaattgatatatccaacacaattcaaaatgaatcagtaaaagtggctagttttggggagatcacttttattgataaaccgggagcgaaagagatttcgttctcttctttttttccaaagaaacacagtccgcttgctgagtataaaggatttccttctcctgaaaatgctattgaaaagatcgagaaatgggtgaaatctaaaaagccggttcaattcttaattactggaacgaaaattaatttaacttgcagtatcgaggttttttcttatagcgagggccaaaaagatataggtgatcgtgattatgaaataaagctgaaggaatacaaaactgcttcgccgcggaagatcaagcagaagaaaaagacgaagaagaaacggccatctaaatcagctcctaaaacatacaccgttaagaaaggcgatacactgtgggaccttgccggcaaattttatggagacagtacaaaatggcgcaagatatggaaagtcaataaaaaggctatgatcaaacgaagcaaacggaatataagacagccaggacactggatctttcctgggcaaaaattaaaaataccgcagtaagcaggtgatgacatgatagaacttttcgtcattaaagaaacggaatggcttgagctggtaactgaaagtgtttccctcgaagggcaacggtatcaggcgccgcgatcgattacggccaagatcattacgaaacagggaacccattcatattacagcgtatctgaaggggatacagttttatttaagtggaagggcaaagaactgttccggggcattgtgttttctcgcaatccggaagaacactggatgacttttacggcttatgatatgctgcaatatttggtcaagaacaaagatgtttatgttttctcaaatcaacgtgcagacgagattataaaacggttggcgcgagattttcagattccgactacatccattgcaaatacaggttacaccattaaatcattagtgtttaaagatgatacgagcctttatgacatgattctaaaagccttgaaacaaacgaaaagccaaaccggaaggaattatcaattatattctgcgaaggggaagcttggccttcgcgcttggccagatctgtcagaagtatgggtgttggagacgggtgtgaacatcaccggctatcaatacagcacttcaattaatgacacggccacaaaagtaaagctccgccggcagaaagacaataaaacatacacagccactgcaagtgacagctcagggatcagtaaatatggtgtgcttcagtatgtcgaaacggtttctgataacattaaccaggcgcagcttcaggagcgtgcgaaagtcaaacaggcacagaaaaaaggtgttaaaaaagaactcaagagtattcaagcgattggcattccggatcttcagagcgggttgcccatctatatctcaattccggaagtcggggttaagaaaacatactggatcgatacagacaaacacgaatttaaaggatcgacacacacgatgaccattgatgtggttgagaaaaattctatccctgatggtgtttcctcatgagattaagtgaagcaatcaaacatttggctgtccgtgcagttgattctgagtcgccagtggatattctaccggctgaagtggtttccgtttcccctgttgaaataaggcttaatgaaaatgacaaattaataatacctgccgatttgattattgttccaaagcggctgcgggccggtgaagaagcattgaatacaggtgagcgtgtgatgattgtctccttaaaaggcgggcaatcattttttattctcgacaaaatataggaggtgtttggaatggctttgtctccggaaatcgagtttgaggatatagaggatgacagcgaggtcatagagacctcgcaaacctacaaaatagattttgaaaatggctgtatcacaaatgaaattatcacaggccttgaagcgattaagcagtttgtatatctgtctctccatactgagcgatatgcatattctgtttacagtcatgacattggaaatgagcttcaagacgtgctggcagataacgaaacaacagacgcatataagaaaatggagatccctcggctgatagaggaagcactgatctatgacgaccgaatttctgctgttacagattttgaaatagataaacaaggcgaatcgttccgtgtctcctttacagtcgaaactgacgaaggaacattggagatcgaggaggtgcttggcgaagatgtttgaagatcaaacctttgaagtaattatggatcgtatgttgaacagcatttcagcggacattgatacaagggaaggcagcgtgatttataacgcgttagctcctgcagccgcagaattggccaagtcttatatttggctcgatacggtgctggaacttgtcttctcagacacagcgcaaggggaatttttagatcgacgggctactgaagcaggcattgagcggactgctgccacaaaagcagtcagggcaggggagtttactgaaggcgtgaccattcctgtagggtctcgcttttatgttgataatctttattttcaatacacagctgacgggacgttggagtgtgaaacagcgggggaagcagggaacgcaaacatatccggtcagaatctattgtcattagacactatacctgggcttcaaaaagcgattgtgaaagagattctgattcctggacgtgaagaagaggatgatgacagtttaagagctagatattttacccgcgtgcgtcgagaagctgtcagtgccaataaagcacactataaacaatgggctgaagaagtagacggagtggggaaggcaaagatctttccgctttggaacggggacggcacagtcaaaattgtcgtgactaatgctaacttggaacctgcttccgatattttgatttctaaggttaaaaactatattgatcctgaacccggacaaggtgagggacaagcgccaataggtgcctttgtcacagtggagagtgcggtatggaaagaggttgagatttcagctgaggtacttcccgaggtcaatagctctatcgaacaggtaaagcaagaaatcgaatcaggtgttttaaatctctttaaaaagattgcttttgaagataacgttatccgtttatcgcagattaataatatcgtctacaattcaccttcagtaagtgattacgcagatattaaaatcaacggcgtggccgaaaatttggttctgagtgatgtcgaaatccctaaattggggcaggtgaacatcattgagcaagctcgatgaaatgacttcttacctgccgccgtttcttaccaaattaaaggaaatggctgaacttcttaaagcggaagctccggaatttgagaagcaaaataacagtatctttgatctgacagatcagctgtttgttactacggcaacctgggggcttgaacgatgggaaaagattttgaacgtaatgcgggaatcaggtgacaccgatgagatccgccgattgcgtctaatctctaaaatgtccaacataccccccgcaacatatagggccattgaacacgcgttgaaccggttcctgaaaaatccgtcagctcaggttcggctgcttcccggagagtaccgctttaatgttgatattgatatagatgatatgcagcacatgagcgagctcatagagacactggagaacatgaaaccggctcatttggcgtatactttgcgagctgctttaaatgagccactcaagataaaagatactgtcattctgaataacagaaggtatcgaaaaacaagtgagctaaaggtaggttattccgtcacgctcaataataacgaggtggtccttacatgattacgcaggtttatagagagcgtacagctgcagatttgaaaaataggatatcgaaagtgctactgaatgggagtgaaacagaaattgtggaactcaccattcacggtgcggttgtcacggtgcttactcaacgagaggaagacatcaaacatattaagagtgttcagatacttgatgatcaaaacaacgtgattacggaaagaacaacagatttagacgttagtaataatagaacgctagattttaggattacttttgaggtggtgtaacaatggcttatgatgcaaaaacagattggctcccggacgatccgattaatgaagatgatgtgaaccgttgggagaaaggcattcaagatgcgcataaagatttagctgtacataaaaatgacatgaacaaccctcacaatacaacaaaggcgcaaatcgggctagggaacgttgataatgtacagcaagcttcgaaaaaagaatttgaagagcatcgtaatgatttacaacggcacattacaccagtggaacgggagaattggaatgcaaaagaaacaattgtcggagctcaggaaaaagcggataaggctttatcggatgcaaaatattacgtggataccaactataaaaataacaatctgacgttaattactggagacaatgctattcaagatgcaagaacaggaggggaagaatatcctttaggactgaccataatggacattgggcagggaaatactacaggctaccccttgggttatggcattgtcaaaaatgaaaaatataataattaccgtttcactcaatacttttacggaacagggaatgagtctgggacttactatgacagtacaggagtttggattagacactggtggagtggttcaggctggactccgtggcaaaagatatcaggttttgctcatgcgaatattggaactacaggtgttcagtatttaaaaaagattgatcacactaaaattgcatttaacagggtcatcaaggatagccataatgcttttgatactaaaaacaatcgatttattgctccgaacgatggaatgtacttaatcggggcaagtatatataccttaaattatacatcttatataaactttcatttgaaggtttacctaaatggaaaagcatataaaacactgcaccatgtaagaggagactttcaggaaaaggataatgggatgaatcttggtttaaacggcaatgcgactgtacccatgaataaaggagattacgttgaaatctggtgctactgtaattacggaggagacgaaacactgaaaagggcagtagatgataaaaatggtgtatttaacttttttgatatacaagaacttggaggccgaaactatccaagattttaggaggtaacgatgaatataggtgaagctattctttttaaatacccaacagctgatcccacaaaggattttattgtccagaataatggtgatggaactccctcatatatagcagagtggaatattagggcacctatacccacggaagcagagttaaaaacttggtgggaagagcttcagagtacatctgcatatgaaccaccagttcaagtggatctacttgcaagagagttgtcacaggaaaaactggctcgtaaacagcttgaagaattaaaccaaactttgggaagcgagctttcaaaaataaagttgcaactgcttactctacaaggagggcaaggttcatgaattattgggtgctggctttgcattataactgggcttcttctgaaatggtgaaacaggcaattcatctcaaagattgttcgcccgaagatttacaggaaggaatagagaaaaaactcattacagctgaacagtataaagagatcacaggagaagccatttagggcttttttatttttccttaaaggaggtggttccgttgtaaacccatgctcaccactaatgatctacaatagcaaggaggatttataatggcatcatatagttttcaattttcaacagatgcaactggtaagccgggggcagccaagccatacagagaaggaaacagagattttgttgtgccggtagcttcaatctccggtaattcagagctgctgacgaacgcagttttaaaagccactgaagtctacacgcaatatggacaagatcgattaggtcaggttttaatttcaaaagtaaaaggtcacgcttattctgatcgtgaaggtaccttattcattgaagaaagtaacgatatgaattcatggaccacaatctcttcattggttgttaaagcaaatacgcttggcgagactgagtggattcatttaactaaacgatatttccgtttcagatacgcaaatggtaacctgcagcaatctgaattcttactttaccagtcattgggcgcaggtgaagaggatataaacattaaccatactgttcctattacagcagttgctccgttctcagtccagttagataaaagcgggttaactaatgatggtcgtttaaaagttcaaactgaaggcttgaatcttagctcattagacactcaatcaaaaacaatggatattgtctttcacgataaaacagaaaccataggtgagggtaacccattcaccgttggatcattcaaaacgttgctcattgaggtttatgggacggctgagacaagtgaattgaagttctggggtaaatccttatcgggaacaaaaagagcccttagagggcagaaagtggatgacggaacgtttgccactagcacaaaaggaaaatcagaagcttggtcttttagcattactggctttaaagaaattgttatggagcttacagctttaacaaatggaaacttttcagttagagggacggccgtctcataagatccggctgtccttttttatttgcctcggaggaggtgattagaaatggaggagacaagtttgtttatcaattttgaaacattagatttagcaagagtatatttatttggaggggtgaagtaccttgatttacttctagtacttagcataattgacgttttaacaggagtaatcaaggcatggaaattcaaaaaactgcgaagccgaagcgcatggtttggctatgtccgcaagctactcaatttctttgcggtcattttagcaaatgttattgatacagtcctcaatttaaacggcgtcctaacctttggtaccgttcttttttatatcgctaatgaaggtttgtcaataactgaaaacttagcacagatcggtgttaaaatcccttcaacaataacagatcgattacaaacaattgagaacgaaaaagaacagagtaagaataacgcagacaaagctgctggctaagccagtggcttttttattatgtagacagaaggagagagggtatatggccattaaagttgtaaagaatctagtctctaaatcaaagtatggattgaaatgtcctaatccaatgaaagctgaatatatcactattcacaacactgcgaatgatgcttcagcagccaatgagatttcttacatgaagaataactctagctcaacaagttttcactttgcagtagacgataaacaagtcattcaaggtattccaacgaatcgtaacgcttggcacacaggagatggaacaaacggtacagggaatcgcaagtctattggtgtcgaaatttgttatagcaagtcaggaggggtacgatataaggcagcggaaaagcttgctattaagtttgtggctcagctacttaaagaacgtggatggggtattgatcgagtccgcaaacatcaagactggaatggtaagtattgcccgcaccgcattttgtcagagggaagatggattcaagttaagactgcaattgaagcagaattgaaaaagttgggcggaaaaacaaactcaagcaaagcaagtgtagctaaaaagaaaacaacaaacacaagcagcaaaaaaacgtcatatgcgctaccatccggtatttttaaagtgaagagcccaatgatgagaggggaaaaggtaacacaaattcaaaaagcactggctgcactatacttttacccggataaaggagcaaaaaacaacggcattgacggcgtgtatggtccgaaaacagcagatgcaattagacgattccagtctatgtacgggcttactcaagacggtatttacggaccaaaaacgaaagcgaaacttgaagctctcttgaagtaaataaatagtctccttgagtatctttctcaaggagatacttatgtttattttgttacagatagttcaaaattattctaatatttgagtaaaaagtattatttttctagtctgaacataatgttatcatttacatgtaaataatttaaaagaaagggattgatttcatgtttaagaaattacttttagcaacatctgcattaacattctctttatcattagttcttccgttggatggacatgccaaagctcaagaggtaacattacaggcacagcaggaagtcacttatcaaactcccgttaaactatccgaattaccaactaatacaactgaacaatctggtgaatttcacacaaatggtattaaaaaatggattgctaaagaagcaatgaaggcaacagccagtgcgcttcgacatggtgggagaattgttggtgaggtagtcgatgagttaggtggatcagcaggaaaaacattcgcaaaacatactgatgatgtagcagatgctttggacgagttagttaaacgaggtgacgttgtggaggacgcaattattgacacggtttcctcatatctaattgatgctggtgtaaaatcttctacagctagaactattgcaagtgtatttactttcttagctttttaattgaggtgatttgaattggtaacagtagaagaaaggcttgacaacctagaaaaaaaagtcgagaagcaggcttttcaactaaggttagtccaacaattagcagctgattatgatcggtttggcttatttgatcaagttttggcctatgatttaagtgaaaaacagtatcaagaattaagagagttaacgagccagtacactgataagattaaaaatggcgaagaggtctctcttcataactttactgaagaatttaaaagaattttgaaagatattgaaaaagaagtggatttcgaaaagtttatttctctctggttaaagggaccagaagaaggttttggattttctaaagctttacataaccatttctttaattaaagataaggaccagccacataataagctggtctttctttattttccctcaagttcgaactcctatgaacagaataccaggtatctatccttccaaatatattgttattagcttgagggtttgtgtgtttttcttcattaatcatagaattctccttacctcagtcattttcttctattatttgcagctgatttcaaattaaataaaataagcccttctcattgagaggggcttataaagtgactcttctttattaaagtcattaaacaacagattctctctttatatcaaaaatatcaatctgctttgattccaaaagatcttgtaaataatctggaccgtgtttctcagttacttgcaattctccttctgatataggtatagccattagccaggtaacacttttgttgctaaattcaagtagctctaaatcttcctcccacagaaatggggaaacgaacataacatgtctcatgtcggtttcctgatcatacatactaatcacatttttaaaaataacacctggtgcacaagtgaaatttgagttgattatattaaaggcacaagttgataaaacattagcatatatgtctgaagctgactccattgcagctacgatttctatccgcaacggagtgccattcacctcataattaatagaatgatccgacaagcctagagttgcatatgacgtgataccttcctgaggctggtcactaaccgataaaatatctatgttgctattctcgttatcatcccaatatttcgtcactttcggtttacctccaaaagctcctaaaactgttctagcaattactttattttcttgtgtaacgcccattagacaatctctcctaatcaccaaagtatactcctttaggacaaaggtaattcaggttgataaagctctggatttttgttgttagtttaggattcgttaacttaaaaacctgacttggagttaagcttttgttaattctgcgtactccaaaaggaaccaacattttgcgctactgaggctatgttcttgcctttctttgaagactttattcctgaacatcacgtccagttatagccttaccatttgctcaaagtgaagccttcttgaaatagaacaaagccccttagaaatttcatggggctttaaaataacataacaatgtacaacatagaaatattcagcttttccttatagcttaatattatatatctctttaatggttcccatgtatttttctacttctaatttattgtctgggtgtcgttctacgtattgaccaacaatttcatttaaatatttataaaaatttccgtaatctaatatgacttcttcatcttcttcgactgctgggtaatcgaaataaaaagctataccctcatctccaaagtaatcttcttcccactctttgtagtcatcagcaaatacacaccaaacattctctataccataaccttctccgttggagaatttctctaaaatttgtatgaatcgttcatcacccataaccttaaagaaataattaattaatgctttatttttattatccatttcatttttacaccgaattatgccctctcataacaagaagggctttccacctttttttactctctcctcaaaaagaaggggaaaggttttatccgtttatccctcgtatagtttattaatcaactctgtaaatgaatcacaaacatagctaatggaactttccttatcttcataagcgatctcatgatcccaaaaaacaattacgggttcttgagaagacattctgtaatcaaaacaaaagaggtttccccctgcatctgtagcaaaaggtatgatcttatcaactaaccggtctttaacattatcaattgtactaaggagatcaattggccgagtaggatctcctatgctcagtaaatggttgattgattctcgagaatcttggaataaaacaacctttttatctataggggaacatccattatggtctttaatgaattctttgtaatctgtcgggaacttgatttttaatttctcttctacctctttgatctgactgtttgtcgcctcttgaaaggtgcttcgttttctccatttaatactttgcattggttaacctcctatttctcatctttcccccaaattttatatccgccagtgtgacctgttttagcatgaattactcggtccaccagctccatttttccaggagtttgatggtggtgccatgtgtatttctctggtgttattccatcttgaagatcaagtaaatcatcttcgttcaaatcaagctttttaatcaatgatgggtcttcttcaatctgcttatataattgtttatttaatttgtcaaaatgttggtctctactttttttaaagtcggctttatcaagtgtgagtgtatgctttgattcgaatagtggaaatccatctttatcatagggaacttttgttactgggtggacatcatttttcaagtgacccattcttaagttaatagtcgttgttttacccgcactgttttcgtacgtgtatggtgcagctttaacaaattgatcatgtttggattgtattgctttttttaatatagacgtattctttacattatgagtattttcaatatcttgggcaatccctacaagtgcaggttcatatctgtttttataaaagggattaataaggttgtttccttttgtaattcctttattcacatgagcagcggctgatccaccttccacgactttacctacttttgatagcttagtagtggtttgcactgcagcacctgcaccttttggaccaacgatattaccgaccgcataactgatataatgtgctcttgagtatgcatcgccatttatcattttatcattccatgaatcaacgatgtttgtccaaattattttagggtaggaggggacacttaagactgttgtaattgtttttgcaagttttagttccatagggagctgtgaaaattcccatgcgcctacaaccaagtccttgattccatatatcgtatcatcaatcgcatcgttaagcccatcattaaccccatcgatgatatccaatgccgttttacctgcattgattacactttcgccaacggacttcaactgttttgcttgttctagctgcactacatactgtaactgtgcaggctcaaggttttcatacccgatctccttggcaatttctaagtattcatctggatccgtcactacgtcagctagcttcttcttcagctctttgatttctcgctctttagcctcctctttcttaatcgtcaaataagcttctgtacgtttctcaatatcgccttttttcttatgtatgtcgctttcacggtatgccttggcgttgtagtggatgggcgtagcgtttttgcctttgcccgttgcttcttggagcttttggaagtctgacttgatgaattgttcattaggttctgacagggcatattctgtcagtaaatcttcgtcaaggtcacctagtttttcaattgttttttttcgtttgtcattagcatccgcaagctcatccttgaaggtttctgttgaaaacaagtcgagcgggaggatttcgtcgatatcgtttagaatatctttcatggcttttttctgttcagacatgatggatttggattttttatgggcgttagccagttcatgttctaaaaaagactcttcaatataagcatcagagaggcctttgtcctcgacagctccggcaatgctgttaaaaaatgcgatcttcatttcaatgtagtcgatccattgatcagtgacacctacatgatcgtgatagaatgctttaatgttattagcgcctttacctgagaattcgctgtcgtccagttcagcgacgctttgtaaagcttttctcaagttgaccatttgcgtccttagttctttatattctttggcgcggtctgtagcttcagacataagtgttttagcttcaaagactttcataatcataccctctcatttaatcatataacaaaatattaccatggaagaatgatgaaactaactgttatgtggatcaaatggtggaaatgaatcattcgatctgtgtcattttacctatttgctaatcctttcaatgaaaggggactttccaattgtaacatcgccatcatgaaaaaattcgataacgtagccagattcactaaacataaaagtatctgatccaacggcagttacatcatcaattacgtttaatgcatgctcaagactggtttttaatgctggctgttctccgtaaccccaaagaataataatgttcctatctttaaaatggtgtttagctagccaatcgtaaatctcttcctcgtaaactatagattgatgacaacaaacttcttcccacttgattcgtccccaagatgtaaagggaaaactgtttgaaagcagttcataatattttgccgttaattcttctgataagatttctttgtttttccctagagcttctaagcattcatcaaataagtccaaaatgttcacctcaaaagctttatgtatgatggattttttcagtattagaaataagaaaaagccgttatgaaacggctaaagggaatcagaactaatgttgtttatcgaatcaaacaaggaattcatgagtaggtgctagagttacattccgggatgcttccttcatttcgccattagacatagatccgaaaaaggcaagtccaattaaaacggcggataaactgataaacaatttagatttcatacatgcattcccctttcgatatttgcttttgagcatataccatcttcttgaaacagatgatactatcctctatttttccattataatcgaaaaggttgcctcctaacaatgccagctcttccagataagggtatcctttgccgttctctaaacgagaaaaaatgttgaggagtttaggtgtatcgccatttcttatataaagaacgtctaatgcttcaaataagttcataaaaagttcgtctttaaaatctacagcacttctgattcctttgcggaagcaatccattgcctgttcttttttgccttgtttaaaataaatcaacgctaggtcatgataagcttgcggaagtacgtcagagtttatttttctgtattgaaccaaggcttgttcgatgtaacgtgcagccttatttaagttgtccattttgtgatagcagttgccgagattgaaaaatgcagtggcatagatgtgagtatttttacttttaagcagctcggcaccttttaaagcttcttgaaggtgggggagagctttttcatgattttcaaggtcatcgtagttaccggcaatgacaaaatggcactgaatacgacgaacagagtaaagctcgtgtttcttataaatgttgtatgaaagctcagcgtaatgcatcgaaatgtgtgtcattttcatatgataatagacttcagacagtttaaaataaaactcagctttttcaatcttgtcggagattgtaggaattttgcgttcagcttttttgtaatatgtaatggctcttgtgtattcaccgtttctaaactcatacatcccgcggaagaagttataataatatgcccgcatattgtctaattttttcttatggccctcaattttatttaaatattctgaaagttccattcggttttcatcagatggcagcgtgtattccaacataattttatggcgaaaggccattagttgataataaataagcaagtcttgatcttcttccataacctctatatcacgttctatttcagcttttaacatttcagcatcagttacgttgaatttttgaatatgcctatgccattcattaatcttcattcccacttcagctgatgtgattgatatcaagatattcacccttcccttaactctactagtactgtaaatattaacaagttttcgttcgcagaaaaaggaaatagggcaccgcaatttaaattttcggtgagaccgcaataactttttgctttagagagttatgaaattccctcctgggagtaccatgacttggcatcaaaaaacagggaatttcggtcattcttgtgatagtttaaaattgaaaacatccagaaagtccagcgttagtcgttttgagggctgagtgtgcatgtacagctaaacgcagaactgattctggatttttcttgataagaaaattacttacctacccactaaaacttaaccaattaattaattaatattcatttggatatatgaaaaagtaattagacattcaccgccttcttgctcccgcaatacattatgataaatgcctttggaggtggattttttgactgagttatatgccaaaagtgatcttgaaaaaattaaagaaacgttacctgattggcaaatgaagtcgtttaactacttaacggaaaaaataggcgataaagaaaataaatttccttgtataccgggaagggtagcatttttaagcgaccagctgcggattgcttttgtcggtgatcctaggaatcctagaactgcgaaggaattagcgccgttgcttactcggtatggaactatttcacgagagacaggaaagtatgcatcattaactataatatttcatacaccagaagacttgcttagtgattacaaaattgaggattacgaatcgttgttttggcagtttctaaattcattgagcatggaagatccagctgattggccagattatataccagaaaatccagagcactttcaatgggaatactgttttaatggagaaccatattttgttctgtgtgctacaccagctcacagcaaaagaaaaagcagaagttttccttattttatgttgacgtttcagcctagatgggtttttgaggatctaaatgatactactgcatttggacgaaatatgagtaagcaaattcgaaaaaggcttgaggcatatgatgaagtacctatccatccgcatttaggatggtatggaaaaaaagacaatctggagtggaaacagtacttcttgcgagatgatgaaaatcaagtgtcacaatgcccttttatgaaaatgaagaacttattcaaaaagaaaaggtctgattaaattgtttaaaaccttatgtggaaggatggattgaatggcttatatcttcacataaggttttaattgatgataaatctgtgtgctctgactaaatacgtattatctcgaattattatcgattctacatattcacaaaaattatttaatgtttttttcttgaaattagaaattagcgtttatgatctccgttgctgtagtagcaaagtagcgatggaggaaataataaaaatggaaaacctctatctggttacacaagcttttagcgggttttacaattaatcaaaataaattgatttatttgcttgcattaatttaaaaatcatgagtataataaatacatcaaaaaaaattgattaaagaaggcgatatgaatggatgagacgaaatcagaactgctacggaaatatgaacaaaaatttaaggctcttgctgatcagaaacgattagagatcatgtatgaactttgtcaaaggggaaaaacctgtgtttgtgatctgactgagatttttgaggtgacgcaatctaaactttcttatcatctaaaaattttattggatgccaacttaataacgaaagagacaaagggaacatggagttattatgatctaaatgatgaggaagtaaatggtttattatcagaagagctttgttgtatatttagaaaaaaaggtgaaggagattgctgctaaaaaaattttttaggtattatatcaaatttttttgattaatatataagagggggaattaaaatgaaatatgttcatgtaggggttaacgttgtcagtttagagaaatcgatcaatttttatgaaaaagtttttggagtaaaggctgtaaaagtaaaaacagactatgcaaagtttctattagagactcctggactgaatttcactttaaatgtcgcagatgaggtgaagggaaatcaagtgaatcattttggattccaagtagatagtttggaagaagttttgaaacacaagaaaaggcttgaaaaagaagggttttttgcacgtgaagaaatggatacgacttgttgttatgcagtccaagataaattttggattactgatccagatgggaacgagtgggaatttttctataccaaatcgaacagcgaggttcaaaaacaagattcctcctcttgttgtgtaacaccgccaagtgatattacaacgaactcttgctgttagtaaaaaaggtgaggataaagtaatgaaacgtttatcttttttagaccgttatttaaccatctggatttttcttgcgatggcattggggataggattaggttttatatttccgagttttgttggtggattaaacaaattacaagtaggaactacatctatccctttagctattggattagtattaatgatgtatccaccactagcaaaggttcgatatgaagaaattggacgggtatttaaagatattaaagtgttaattttatctttagtgcaaaactggatcatcggaccgactctcatgtttattttggctatcatctttttgccagataaaccggagtatatgattgggcttattatgattggattagctcgctgtattgcgatggttattgtttggaatgacttatcaaaaggtgatacggaatacgcggcaggattagttgccttcaactcaattttccaaatgctttttttctcagtttatgcttacatttttgtaacagttattccgcaatggttagggatggaaggagcagtagtgaatattacgatggcagaagtcgcaaaatcagtattcatttaccttggagttccttttattgcaggaatggtgacacgttatatttttgtaaaagtgaagggcaaagaatggtatgaaaaagtgttcattcctaagattagtccaattacgttaattgctttgctatttacaattatcgtcatgttttccttaaaaggtgatgtaattgttagcttgccgttagatgttgtccgagttgcgattccattattgatttactttgttttaatgttctttgtttccttctttttagggaagaaaatcggggcaaactatgctgtaactactactttagcttttacagcaggaagcaataactttgaattagcgattgctgtagctgttggtgtatttggaattcattcgggtgcagcatttgccgccgtaattggtccgcttgtagaagtgccagtcatgatagcacttgttaaggttgctttatggtttcaacgaaaatactttggaagtcactcgatgtagaggtggaatatatggagaataaaatcatttactttttatgtacagggaactcttgccggagccaaatggctgaaggatgggctaaacaatatttaggtgatgagtggaaagtgtatagcgcggggatagaagcacatggattaaatccgaatgctgttaaagcgatgaaggaagttggtatagatatctctaatcaaacgtcagatataatcgattctgatattctgaacaatgctgatttagttgttacgctttgtggagatgctgctgataaatgcccgatgacgcctccacatgtaaaacgtgagcattggggttttgatgatccggcaagagcacaagggacagaagaagaaaaatgggcgtttttccaaagagttcgtgatgaaatagggaataggttgaaggaatttgctgaaacagggaaataaataaactcttttgttaaaggatgcatatttatatgtgtcctttttttattaatgtctagctatacgaacttgacaccagtgaaatgtcattaactatctaacaatgaaaaacactactccattgtactctcaaataataataaatcattgaaaactataataagcgaatgttgaggcatagaaaataaaatcttttctattgaggacctaaaggagtgtagaaaagtcacaacaactttttttaaattttttgcatattcattgaaacgtttaataacactatagtttaatttaaaatctcctcatttggacaaacagctgttacatagcattacccaaggggtgatgcattttatgaaagtgataatcatcgagggaccgcaagctgacaaatgcattaacgattgctatcattatttaataaaactttataggaaggagattcagggtgatagcaatatatgtaagggtatcgaccgaggaacaagcgatcaagggatcgagcatcgacagccaaatcgaggcctgtataaagaaagcagggactaaagatgtgctgaagtatgcagatgaaggattttcaggagagcttttagaacgtccggctttgaatcgcttgagggaggatgcaagcaagggacttataagtcaagtcatttgttacgatcctgaccgtctttctcggaaattaatgaatcagctaatcattgatgacgaattgcgaaagcgaaacatacctttgatttttgtaaatggtgaatacgccaattctccagaaggtcaattgtttttcgcaatgcgcggggcaatctcagaatttgaaaaagccaaaatcaaagaacggacatcaagcggccgacttcaaaaaatgaaaaaaggcatgatcattaaagattctaaactatatggctataaatttgttaaagagaaaagaactcttgagatattagaagaggaagcaaaaatcattcggatgatttttaactatttcaccgatcataaaagcccttttttcggcagagtaaatggtattgctctacatttaactcagatgggggttaaaacaaaaaaaggcgccaaagtatggcacaggcaggttgttcggcaaatattaatgaactcttcctataagggtgaacatagacagtataaatatgatacagagggttcctatgtttcaaagcaggcagggaacaaatctataattaaaataaggcctgaagaagaacaaatcactgtgacaattccagcaattgttccagctgaacaatgggattatgctcaagaactcttaggtcaaagtaaaagaaaacacttgagtatcagccctcacaattacttgttatcgggtttggttagatgcggaaaatgcggaaataccatgacagggaagaaaagaaaatcacatggtaaagactactatgtatatacttgccggaaaaattattctggcgcaaaggaccgcggctgcggaaaagaaatgtctgagaataaattgaaccggcatgtatggggtgaaatttttaaattcatcacaaatcctcaaaagtatgtttcttttaaagaggctgaacaatcaaatcacctgtctgatgaattagaacttattgaaaaagagatagagaaaacaaaaaaaggccgcaagcgtcttttaacgctaatcagcctaagcgatgacgatgatttagacatagatgaaatcaaagcacaaattattgaactgcaaaaaaagcaaaatcagcttactgaaaagtgtaacgaaatccagtcaaaaatgaaagtcctagatgatacgagctcaagtgaaaatgctctaaaaagagccatcgactattttcaatcaatcggtgcagataacttaactcttgaagataaaaaaacaattgttaactttatcgtgaaagaagttaccattgtggattctgacaccatatatattgaaacgtattaaagaggggtgtatgcaccccccttttgtaattacaatctcattttcaatacacctcgcagcatacgtcgccagctttgtccctttaccagcggaatagctttcaattccttttatcagcccgattgttccgatggagattaagtcctctgcatcctcacctgtattttcaaattttttcacaatatgggcgaccaagcgaagattatgctcaatcagcatgtttctggcatgttcatcccctttagccatgagctctaagtattttttttcttcgctgcttgagagcggttgtggaaaggcattgtttttcacgtaagatactaaaaagacaagctctttaacaacaaagccgagcgctgcgaaaacacctgtcaccatcgtcacctccacaaaagtatgtaggcaaaagcctatatgtaaatgtatgtgaccgggaggctgtctgtgtctgtaccgggaaatttctcgcggaggagtccggctttggtaagcagcatactaacttcaaatgttaaaaatattcttcatcaagcgcccatacattgaaatgaacaaaggtatggggggatgggaatgaaaaaatggatggcaggcctgtttcttgctgcagcagttcttctttgtttaatggttccgcagcagatccaaggcgcatcttcgtatgacaaagtgttatattttccgctgtctcgttatccggaaaccggcagtcatattaaggatgcgattgcagagggacatccagatatttgtaccattgacagagatggagcagacaaaaggcgggaggaatctttaaagggaatcccgaccaagccgggctatgaccgggatgagtggccgatggcggtctgcgaggaaggcggtgcaggggctgatgtccgatatgtgacgccttctgataatcgcggcgccggctcgtgggtagggaatcaaatgagcagctaccctgacggcaccagagtgctgtttattgtgcagtaataaagaagaggctctttcttgagcctctgttgttacaatccttcgccgagctgaattttcgggggataggtttctgcttttcgccaatattggcgtgtgccttcgtcccgtacaacgatgcccagctgtgccagttcgagacggaattcttcaatatcgtctttttcttcgtcctgcagcgctttgtgacgagcttttaataaggcatgggcgccttgcgataggtctggtgcatcaggaatccatcggcgaaattgatctttaaacggatcaccatctgttgcccattcgtaatgatgctgtctaaaggccttctcaacgtttactggtttttcatcaatttcttcccgtaccaattcatatccggctgttcccaggaggacaagccgtttgtgatccataaatacaagagcgatgtcatcggaatgaattgtttgcactttttttcctttgatgaattccactgtgtgatctgtaattttgacagacagcagcattgcaataacagaatgagcgaaccaaatccccgcacacataccgagaagagcagtgataaatgaagctgtagatccctgaaaagaggtaatgagccgaagtggtccttcaagagggatccaggggagggataatgcccatttcgcaatctgcggaataaaatacccgattgcaaaaccgatgattgcaagtgcagcgtataaaaagaatacagcggttttcgtaactccgataagagtatgagattgattctgcaacatgtcaccttctttttactaaaaaaatcgaataccttcccatattttaacttaaactgatggtaaatcaaggataaagtgataattatggatataaagagattcagtaatagaactggcaggcacagtcagtcatgaaaaataaaatttacatgcgcagacgatgtaagccccatttgttttctgcgtatcacaatacaatccaaagggaacataaagagtaaaggctttttagacaatcaggaggaacagatatgaaaattggattaatcggcttagggaaaatgggcataaacataggaaagcaattcattgaccgcaattatcaagcggttggatatgatgtaaatcaagcggctgttgatgaactgaaagcatacggggctgaggggacaacgaatcttaaagagttaatttctttattagacccgccgcgtatcctatgggttatggtaccgcatggcattgtcgatgctgttttgcgtgatgtatcacctttattaagtaaaggcgatatgattatcgaagctggaaactctcattataaagaatcaattcgccgctacaatcaaatgaaagaagcgggtatccattatctcgatgccggaacgtcgggcggaatggaaggcgcacggcatggagcctgttttatggtggggggcgatcatgaagcatgggagattgtggaaccgctttttcgtgatactgccgtcgaaaatggttatctatacgctggtgaagcgggaagcggacattttttaaaaatgatccataatggaattgagtatggaatgatggccgcgattggtgaaggattcgaagtgcttgaaaacagccaatttgattttgactacgagaaggttgccagagtgtggaatcatggttctgtcattcgttcttggcttatgggactgactgagcgagctttcgctaaggatgcgaaactggatcagatcaagggcattatgcattcctcaggtgaaggaaaatggacggtggaaaccgcgcttgatctgcagacggcaacgccggtcatcgccatgtcactaatgatgagataccgttctttaacagacgatacgtttacaggaaaggtggttgctgcgcttcgaaatgaatttggaggccatgcgacagaaaaaaagtaagggggccaacaagcctccttatttttttggcaccttcagaagatgagggaactttttataaatgaccagcatgatgatcagaatatatgcaccgtaaatgctgatagacaataatttattgctggtgaaattggcacctgcaatagtgacaacaataatattggggattttccctattaaagaagcaaagaaaaaaacatgccagcgaacctggctcagaccgcagatcacattcattataagggaaggtatgacaggtatcagccttcctaataaaacagcggtaaaagcgtttttgttgaaggaagcctcgtagctttgtatggcaggataggcctgaactttttttctggcccaatctctaaaactgtacctggcgagaaaaaacagcaatattgtaccaagcattgagccggtcagtgtaatccaaattccatttgcagtcccgaacactgcgccatttaaagcagcaatcaaagcaaacggcactattgggaaaaaaacatcggcagcaatcagcagcatactaaataaaacggaaaacatccctcctgctttgattgcatcaagccaagcttctttctgaaaaaaaccaactgaaatgatagcgataatcacaagtatacctattactttttttaacatgtctatggtcactcccaacttaggtgatgtcaggagtcaaaacctccgtcatctaaattagtataactggtgccatttcagcggttcaactgaaaaccaggttgagaacacaattctttttaaccttataaaaaaggctgtccatctctctgttttctgcattcttattaatagggagggatagaaatggtaaccataaaaaaggattttataccggtatcaaatgataatcgtcctggctatgcgatgacgcctgcttatattacggtgcataatacagcgaatacagcaaaaggcgctgatgcgaaaatgcacgccaattttgtgaaaaacccgagcacatccgaaagctggcattttacagttgacgattcagtcatttatcagcatctcccgatagatgaaaacggctggcatgcgggagacggtacaaacgggacaggaaaccgcaaatcgatcgggattgaaatctgcgaaaatgctgatggcgattttgaaaaagcaacatcaaatgcccagtggctgatcagaaagctgatgaaggaaaacaatattccgttacatcgtgttgttccccacaaaaaatggtccgggaaagaatgtccgcggaaactcttgaaccactggaactcttttataaacggaatttcttcctcggatacacctccaaaagaacctttaccatcatatcctctgccgtctggggttataaagctcacttcgccttatcgaaagggcacaaacattctccagctgcaaaaggctttagctgcacttcacttttaccctgataagggagccaaaaacaatggcatagatggagtttacggaccgaaaacagcgaatgccgtcaagcgttttcagctcatgaacggattaactgcagacgggatttatgggccaaaaacaaaggccaagcttaaatcgaagttaaagtaaatgcaggatttaacggataacctgtttccagtgcggattcaggttattttcttttctttggtttgtgtgtttttcagattggaaagaagggaatttcaaaaaatcatcagctgcgccgcaatgaaagcagaatgatattcactgagggggacacgttaactataggaaaaaacagtgatagcgaaaaactcttcattgaacgaagagaaacagaggtataacattaaggtgaggcttttgggggtgtaaagatgaaacattttatcatccttttccttctgctgttcgttacagcaggatgcgagggaaggggatacgaagacgttgtagcatttggtgacagcaatacgcgtggctctaattgggattatcgcgattatccaaaagcacagcagtgggtcaatatattaaaaacagctgagcgcggtaaccttgatatactcaatgcgggaatcggcggacagacgacagaggatgcccgtctccgatttcagacagatgtgctggatcaaaaaccgaagtatttgtttattatgttcggcaccaatgacgctgccatactgactgaggggaaaccgagagtgtcgaagcagcgttttagagaaaatctggtttattttattgaagaaagcagaaaacacgggatcaagccaatcttaatgacgtgtatcccaattatagaaggtaatgggaagcatcatttgttttactattccagatatcaagcagctgcttttgaaccaaaaggcggagcaaggaaatggcacaactcatataacgatattacaagagatgtgtcgaagcgcctggatgtccctcttgtagataactggaagcattttatagaagcagacggcggaaaagcaactgatgaagcgcttatccaatctggtcttatagatccttctggaaatcatatgacacctaaaggggcaaggatcgtatatgaaggaatacaagatgggcagatcctgcagcgttgagccggacaaccgcctagtccgatttatttctcctacataggctgttataaaaccttattaaggaggcgcttcacatgtatggcgcaggcagagcatatggatacgcttttattgttgttttagttgttgttctcctggttgtgggcggcatatactggttagcataataaccggccctttaaaacacctctttttaggggtgttttttgctgaaagtagtagtaaagcgcgcagccaaagtgatataatatcagtcatctgagtaaaaaaaggaaatacgcccggaaaaaatagacaaattcctattaagaagatacggaaataatatgtccgagcgatcttctttttatttcgttttcaattaactcgataaagtcacggtttaaattcatttcggtggctttgaaataagattctattagtaattcatcagacagttttctcatgctaggaacccaattaatgggagaggcacctccttaaaagttggaatcattcatgattttaacgcatacaatgataagttgcgttcatctgaggttgaagttatctttaatctaccatgaaatgcatataagaacaatcgttctgttatccacaccaaaaagtggataacttgtgagtatcgtgtttataatttgtctaaagagtgatgtaataagagtggatagtgtgtgtaaatttatccacacctggtgaagaaacccaatttttgtcgaaatttttttgctcagtttttctttaggcgcaagttcgatttttttcgacaatcattttgaaagaaagaaaaagggaagggtgcgggttttgttaaaaaagttttttttacctgacgagtttgtaaaaaatatttttcatattacacctgagaaattaaaggaacgaaatgtaaaagggattattactgacctggataatacgcttgttgaatgggacagaccgaatgcgacgccgcgattgatcgagtggtttgaagaaatgaaggaacacggcattaaagtgacaattgtctctaataataacgaaagaagagtgaaacttttctcagaaccgcttggaatcccattcatctataaagcaagaaaaccgatgggtaaagcctttaatagagcggtgcgcaatatggagctgaaaaaagaggactgcgttgtcatcggagaccagctgctgaccgatgtactcgggggaaaccgaaacggctaccatacgattttggtcgtgccagtcgcttcctctgacggattcattacgcgctttaaccgccaggtcgaacgcagaatactgagtgctctcaaacgaaaagggcacattcagtgggaggagtaagaaatggaaaaggttgtttgtatcgggtgcggagttacgatccaaaccgaggacaaaacaggtttggggtacgcgccgcctgcatcgcttacgaaagaaaatgtgatttgccagcgttgcttcagactgaaaaactataatgaaatacaagatgtctccttaactgatgatgattttttgaacattcttcacggtattggagaaacggactctcttgtcgtaaaaattgttgatatttttgattttaacggcagctggattaatgggctgcagcgcttggtggggggaaaccctatcttattagttggcaataaagcggatattttgcctaagtcactgaaaagagaacgtctgatccaatggatgaagcgtgaagcgaaagagcttggcttaaaaccggttgacgtatttttggttagtgcgggacgcggccagggaatcagagaagtaattgacgcgattgagcattaccgcaatggaaaagacgtctatgttgtcggatgtacaaatgtaggaaagtcaacctttattaaccggattattaaagaagtgtcaggtgaagaagatattattacaacatcccaatttcctggcacaacccttgatgcgattgaaatcccgctggatgacggttcatcgctttatgatacaccgggaattatcaacaaccatcaaatggcgcattatgtcaataaaaaggatctgaaaatattatctcctaaaaaggagctgaagcctcgcacattccagcttaatgatcagcaaacactgtattttggcggacttgcaaggtttgattatgtgtctggggaaagatctccttttatttgctatatgccgaatgagctgatgattcatagaacaaaacttgaaaatgcagacgcgctttatgaaaagcatgcaggggaattgctcacacctccgggtaaagatgaaatggatgagtttccggaattggtcgcccatacgtttacgataaaagacaaaaagacagatatcgttttctctgggttaggctgggttactgtccatgacgccgataaaaaggtaactgcatacgcgccaaaaggcgttcatgtatttgttcgacgttcattaatttaagaaaaggggagaggagtatgaaaaagctgtacggggttatcggaaatccgattggccattctatgtcacctgatattcataacgcatcattgaaagacctcgggcttgacggacattatcatgccttcaaggtagaagagaatgatctggaggatgcggtaaaaggaataagagctctaggcgtacaaggaatcaatgtgactgttccgcacaaggtttccattatggattatctggatcatattgatgagagtgcaaaagtgatcggtgccgtaaacacggtcagaagagagggagataagcttgtcggatacaataccgatggggaaggcttcgtgaagtcattaatgaaggtattagacaagcccatctctgaactgtcattcttaatgatcggcgctggcggagcggcgagagccatttttacaacaattgtccgaaacaccccgaaaaaatttgacatttgcaaccggacgttagaaaaagcaaagcggcttacagaagctactccctcgtttcacaataaagaagtattaagcataaaagaagcagaagaacgtcttgagcagtatgatgttatcatccatacaacgtctgtgggcatgtatccgaacgtggacgatgtgccgctttcattacagcgtgccgcgagcagtgccgtcgtatgtgatatcgtgtataatccaatacagacggcccttttaaaggaagcaagccaaaaaggcttgaaaacactcgacggtgtgggcatgtttgttgaacaggcagcattgtctttccaattgtggactggacaagagcctgatattgaaaaaatgagatccattgtaataggaaaattaggaggaacagaatgttaacaggtaaacaaaaacgttttttgcgttctaaagcgcatcatttaacgccgatttttcaagtaggtaaaggcggagtaaacgacaacatgattaaacaaattgctgaggcgcttgaagcgagagagctgattaaagtcagcgtgcttcagaattgcgaagaggataaaaacgatgtagcggaagctcttgtaaaaggaagccgctctcaattggtgcagacaatcggcaatacgattgtgttatataaggaatcaaaggaaaataaacaaatcgagcttccttaaaggtggttgaaatgaagaaaatcggaattttcggaggcacgtttgaccctccgcataatggtcacctcttaatggcgaatgaggtgctgtaccaggcggggcttgatgaaatttggtttatgcctaatcaaattccgccgcataaacagaacgaagactataccgacagctttcatcgcgtggaaatgctaaagcttgcaattcaatctaatccgtcctttaagctggagcttgttgaaatggaaagagaaggaccgtcatatacctttgataccgtttctttactgaagcagcgttatccaaatgatcagctgttctttattatcggcgctgatatgattgaatatttgccgaaatggtataagctggacgagctgctgaacctcattcaatttattggagtaaagcgccccggttttcatgttgaaaccccttatccgcttctctttgcagacgttccggaatttgaggtatcatcaactatgataagggaacggtttaaaagcaagaagcccactgactacttaatccctgataaagtgaagaagtatgtagaggagaatggtttatatgaatcgtgaggaggcacttgcatgcgtgaagcagcaattgaccgaacaccgatatatccatacggttggcgtgatgaacacggcgatcgaacttgcggagcgttttggagccgattctaaaaaagcggaaatagcggcaatctttcatgattacgccaaattccgcccgaaagaagaaatgaaacaaattattgcgcgtgaaaaaatgcccgcgcatttattggatcataatccggagctctggcacgctccggtcggcgcttatttggtccaaagagaggcagggcttcaagatgaagacattcttgacgccattaggtatcatacctcaggccgccccggcatgacacttttagaaaaagtcatttacgttgccgattacattgagccaaaccgggcatttcccggtgtcgatgaggtgcgtaagcttgctgagacagatttgaatcaagcgctgattcagtccattaaaaatacaatggtttttcttatgaaaaaaaatcaaccggtttttccagacacatttttaacgtataactggcttgtgtctggcagctgaacaggaggaatttgtgaatgaatcaaaagtccattttaaagatcgcagctgcggcttgcgacgataaacgggcagaggatattttagcactggatatggaaggtatttctctggttgctgattattttctgatctgtcacggaaattcagataaacaggtacaggcgattgcccgtgaaatcaaggatcaggctgatgaaaacggcattcaagtcaaaaagatggaaggctttgatgaagcaagatgggttctcgttgatctaggcgatgtgattgtccatgtcttccacaaggacgaaagaagctactacaaccttgaaaagctgtggggagacgctccgctcgcagatcttgaccttggaatgaatcaatgatttatcaaggctttgcaagtgtgtatgacgagttaatgtcacacgcgccttacgatcaatggacaaattggattgaagcatctctcccggaaaaaggccgtattctcgatctggcatgcggcacgggggaaatctccatccggcttgccgaaaaaggcttcgaggttacaggcatcgatctcagcgaagagatgctttctttcgcccagcaaaaggtatcgagtagccagcctattttatttcttcagcaggatatgagagagattaccggctttgatggtcagtttgacgctgttgtgatatgctgtgactcattaaattatttaaaaacaaaaaatgatgtgatcgaaacctttaacagtgtttttcgggtattaaagtctgaaggcatactgctgtttgatgttcattcatcttttaaaattgcggaagtctttccggatagcacatttgctgaccaggacgaagatatcagctatatttggcagagctttgccggaagtgacgagctttctgtcattcatgatatgtcgttttttgtgtggaacggagaagcgtatgatcgttttgatgagacacacgagcaaagaacgttcccggtggaagaatacgaagaaatgcttaagagctgcggctttcagctccatcgcgtgacagctgattttacggataccgagccatcagcacaatcagaacgcctctttttcaaggcgcagaaatcaaaaaccatcgtttcttaaaacgatggttttttaaaatgcttttttatgcttttgcagtacagacgaaagtatgacatactcgtctacacatgaaactgctttttcactgcagaaatatcctcctcgtacttcatatgagtattttgaaatacccggtgaaacatatcctgcacaccgctttccagcgctttaatgccttctcctgttacaccgcctttaacgcaaaccttttcctgtaatgcaggcagggtatacaattcggtttctaacagttttcccattccgacaagcatttccttacacatcaaaatcgcgtcctgtttagatactgatgtttccgtgacagctgcatctataaaccgctgaatcagatagctcataaaagcggggccgcagcttacgatgtctgatgcaacccttgtgatgtcactttcaatttgcagcggatgagagatatgctgcatcagctcattgattttcgtttttgcagattcgccgcagcttgtgccgaacgtgacgagagaaacacctgccagcgctctgttcgtaatacttgggatcactcgcgccacttgacacggcacatattgttcgagctgttcggtttgaacggggcttgtaattgaaatgagaatatgatcttttcttaaataaggtagcgctcttgccagtaaaggatatatatcaagcggcttaacacaaataaaaatcatctcattttcagaaacgagcttttcgagactttcggtaacgttgatgctgttgtagcggttttttatgtgcaacgctttttcaattgtgcggtttgtgattgtcatgtttgagggatcggccgcttttgattcaataaatgattcgataaggatcgtacccatatttcctgtgccgataaagcctatcttcaatggtttcccctcctttgagctattatcctctaaaccatatgtgttatgaaaataaaatatgacgaaagcggggaacatgcacgatgaattggttgaatcagcataagaaagcaattgttttagcggcttctgcggctgttttcacagcgattatgatctttctggccacagggaaaaataaagagccggtgaagcaagctgtaccaacagaggcagaaaatacagtggtaaagcaggaagcaaacaacgacgagtcaagcgaaacaattgtgatagacatcaaaggtgctgttcagcatcctggagtttatgaaatgcgaacaggggacagagtatctcaggcaattgagaaagcgggcgggaccagtgaacaagcagacgaagcgcaagtaaatttggcggagattttgcaggacgggacagtggtgtacatcccgaaaaagggagaggaaacagcagtgcagcaaggtggcggagggtctgtccaaagcgatggagggaagggagcgctggtgaatatcaatacagcaaccttagaggagttacaaggcatctcaggggtggggccatccaaagctgaagctattattgcataccgggaagaaaacgggcgtttccaaacaattgaagaaatcactaaggtttcaggaataggtgaaaagttatttgagaaaataaagtcttccattacagtaaagtgatttgacggtcatgcattatgataggtaaactataggtcaggcaacacaacatttggagggaacaacgtggaacgaatttcatggaatcaatactttatggctcaaagccatttattggcgctgcgcagcacatgtccgagattatctgtcggcgctactatagtcagagacaaacgcatgatagcaggaggctacaacgggtcaatcgcgggcggtgtacattgtgcagatgaaggatgcttaatgatagatgatcattgcgcaagaacgattcacgctgaaatgaatgcgattcttcaatgctctaagtttggggtgccgactgatggagcggagatttatgtgacgcattatccgtgcattcaatgctgcaaatctattattcaagctggtatcaaaacggtttattatgctgaggattacaaaacacatccgtatgcgcaggaattatttgaacaggcgggtgtaactgttgaacaggttgaactcgatgaaatgatcgttgatctgaaaaacagagaaaagctttcatttgtagcgggtcttatagggaaattggccgatgccggtttagcggaggaagaattgaaaaagatacatgaacaggcgaatacacttttcacgagctacgtgtgatgaatgcgtaattcgcgtttgttattgcctatggcggcagcttcggcaacggctggaattactgccgccgcttatttccccgctatttttcttttcatcctctttctcctcatcattttaatcaaaacgaggcacgcttttcttattattgtttgtttcttctcttttatattgttttttgtactgtatgcagtcacagattctcagaatgtctcttcctatcggcagggaacctatcaattcaaggcagtgattgacactattcccaaaattgacggcgaccgtatgtctatgatggttaagacacctgataaggaaaaatgggctgctgcgtatcgcattcagtctgctggtgaaaaagaacagctgttatacatagaaccaggaatgtcatgtgagttgactggtacattggaagaaccgaatcacgcaactgtgccgggtgcatttgattataacgagtatctttatcggcagcatattcattggaattactctgtcacgtctatccaaaactgcagcgaacctgaaaattttaagtacaaggtgctcagcttgagaaaacatatcatatcattcacaaacagccttctgcctcctgattcggcaggaattgtacaggcacttacagtcggtgacagattttatgtggaggacgaagtgcttaccgcgtatcaaaagcttggtgttgtccatctcttggcgatatcaggactccacgtggggattttgacagcaggtttgttttatatcatgatccgtcttggtataacaagagaaaaggcgtcaattctgttgctgttatttctgccgctctatgtgatgttgaccggcgctgctccttcagtgctacgcgccgctctcatgtcgggtgtttacttagctggaagccttgtcaaatggcgtgtccactctgcaactgcaatttgtctttcatacatcgtccttctgctcttcaatccttatcatctctttgaagccggttttcagctatcgttcgccgtcagtttttctttaattctatcctcttctatttttcatcaggttaaaacctctttgaggcagctgacaattgtatcactcatcgctcagctgggctcgcttccgattctcctatatcattttcatcagttttctatcatcagcgtaccgatgaatatgttgatggtaccattttataccttctgtattttgccgggagctgtagcaggtgttcttctattaagtctttccgcttcgtttgggagattgtttttcagctggtttgatttattgataagctggaccaataggctaatcacaaacattgcagatgttgaagtgttcacgattatgatcgcacatcctgcacctgttttgctttttttattcacggtcacgatcatcctattgcttatggcgattgaaaaacgctccttgtcgcagttgatggtaaccggaggcatttgctgcacggtgatgtttctgctctttatatatccgtgtcttagttccgaaggagaagtggatatgatagatattggacagggtgacagcatgtttgtaggtgctccgcatcagcggggtcgtgtcttaattgataccggcggcactttgtcttactcgtcagagccttggcgcgaaaaacagcatccgttttcactgggggaaaaggtgctgattccgtttttaactgctaagggaatcaagcagcttgacgctttaattctgacgcacgctgaccaagatcatatcggagaggcggagattctgctgaagtatcataaagtaaagcgcctcgtgattccgaaagggttcgtttctgaacctaaagatgagaaagtgctgcaggcagccagggaagagggagtggaaattgaagaggtgaagcgaggcgatgtgttgcaaataaaggatttgcagttccatgtactgtcaccggaagcacctgatccggcaagcaaaaataattcatctctcgttctttggatggagacgggcggtatgagctggatcttgacgggtgatctggagaaagaaggggaacaagaggtgatgaacgtgtttccgaatataaaagcagatgtgttaaaggtggggcaccatgggagcaaaggctctaccggtgaagaattcatccaacagcttcagccgaaaacggccattatctcagccgggaaaaacaatcggtaccatcatcctcatcaagaagttctgcaactattacagagacattctatccgcgtgctgcgaacagaccaaaacggaacgatccaatatagatataaaaacagagttggaaccttttctgtctatcctccatatgatacatcagatataacagagacgaactaaaaaaagactgccgagaaatcagcagcccgggcagtcgctgttatgaaccaaccaggtgaataaccgttgccatgacaaacaagaaggcgaaaaatccgaaggacacaacaaaaccaacagctgagtctacagcatcatttcgtttgctttgaacgtttttttcaaaatcattcaactttatccctcctgactgatttaagtataatcgaatcgttttgaaaaatctagaagcttaggtaacgttttctgttctggtgattatcgcctttttacaagctgtcccgggggcttgcgaacaggcgtttaatataaatggggaagcagcagtcaggcttcctctttactattttgcaaactcaatttaggatagagggggatgatgaaagagaggaagtcgtacaacaatggtatttgatgtgtggaaaagcctaaaaaaaggagatgtccatccggtttattgcttatacggaaaagagacatatctgctgcaagaaaccgtcagcaggatcagacagacggtcgttgatcaggagacaaaggatttcaatctatccgtttttgatctggaagaggacccgctggatcaagcgattgcagatgctgaaacgtttccgtttatgggagagcggcgtcttgtcattgtgaaaaatccatattttttaacaggtgaaaagaaaaaagaaaaaattgagcacaacgtcagtgcgcttgaatcatatatacaatcacctgcgccttacacagtctttgtcctgcttgctccgtatgaaaagcttgatgagcggaaaaagctgacgaaagcgttaaagaagcacgcgtttatgatggaggcgaaggaattaaacgcaaaggaaacgacagactttactgtcaaccttgcaaaaacagagcagaaaacaatcggcacggaagcggcggagcatttggttctgcttgtgaacgggcatctgtcatcgatttttcaggagattcaaaagctctgcacgtttattggagatcgtgaagaaattacgctggatgatgtgaaaatgcttgttgctagaagccttgaacaaaatatttttgagctgatcaataaaatcgtcaaccgaaaacgaactgagagtctgcaaattttttatgatttgcttaaacaaaatgaagaaccgatcaaaattatggcgcttatttcgaaccagttccggctgattctgcagacaaagtacttcgcggaacagggatacggacaaaaacaaatcgcttctaatctaaaagttcacccatttcgggtaaagctggcgatggatcaagcaaggcttttttcagaggaggagctccgttcaattattgaacagcttgccgtcatggactatgagatgaaaaccggaaaaaaggacaagcagcttctgctcgaactgttccttttacagctgttaaaaagaaatgaaaaaaacgatccccattattgaggatcgtttttatattatgcagaaagtccgttcacttttttcgctagtcttgatttgtatcgagctgcggtatttttgtgtacaagacctgttttcactgctttatcaatacgtttagctgcttcagtaagagcagttttcgctttgtcagcttcgttgttggcaacagaagcttcaacttgtttgattgcagtacgcatagcagatttgattgtcgcgttatgaacgcggcgttcgttgtttgtttttgtacgtttaatcgctgatttaatgtttggcatgtgtttcacctcctaagatacaacctgtagcacagtgtcttaaggttaaatcttcttcacaatagaacaaattgtattctatcaaacacacctttagattgcaatataaatgtaaagtatttttcattgaaggttctctttttagcatgattcattcagcaaatggcaacaatataggtacttaatgtgaaggaggcccctgtatgaaaaagagtgagctggatgtgaatcagtatttgatacggaccgatttggcagtggaaacgaaggaagcaatggccaatcagcaggctgtgccgacaaaagaaattaaaggctttattgaaaaagagcgtgatcacggcggcattaaaatccgcacagttgatgttacaaaggaaggcgcagagctttcgggaaaaaaagaagggcgctatttaacgcttgaagcacagggaatcagggagaatgattcggaaatgcaggagaaggtctctgctgtctttgcggaggaattctcagcttttcttgaaaaccttaatatctcaaaagatgcgagctgtttgatcgttgggctcggcaactggaacgtgacacctgatgcgcttggaccgatggcagtagaaaatctgttggtaacaaggcacttgtttaagcttcagccggaaaacgtacaggagggttacaggcctgtcagtgcatttgcaccgggtgtaatggggataacaggaatcgaaacaagtgacattattaaaggtgtgattgagcaatcgaagcctgattttgtcatcgccattgatgcgttggcggcgcgggcggtggaaagggtcaacacaaccattcaaatatcggatacaggcattcacccgggatctggagtggggaataaacgaaaagatttaagcaaagacacgcttggtgttccggtgattgctatcggtgttccgacagtagttgatgccgtgacaattgccagcgacacggtggactacatattaaaacattttggcagagaaatgaaggataacaggccatcaagatcgcttgttccggcaggcatgacgtttgggaaaaagaaagtgctcactgaagaagatcttcccgatcaaaagcagcgccaatcgttcctagggattgtcggaacccttcaagaagatgaaaaacggcagctcattcacgaggtgctttcgcctttagggcacaacttaatggttacgccgaaggaagtcgattcatttatcgacgatatggcaaatgttttagcaaacggactaaacacagcgcttcatgaaaaagtgtcacaagaaaacaaaggctcctacaatcactaaacagttctacttcctctagcttgttcatagagtaattactagacaagcgctggagggattcaatgagaaataaacgcagaaacagacagattgttgttgcggtaaatggagggaaagcggtaaaagccatctttctatttatcgtaagccttatcgtgatttttgttctatccggtgtgctgacgtctctccggccggaacttaggccgtcgtctgactctttttatgggattgctgaagaattgccgggtgacgtatttgcacatttgctgcggatggaaaaccattatttcgcttctgacctctctcaaaccgacagctcatttcatctttctcgtctttctttaaagctggcgacgagcattaacctcgaagatccgcggagctttctcggtcgggagctgccagggtttgcacaatttgataccgagattttgttagctggacaaggaaccgattatacgaatatgcctgcggaatcgccgccgccgtctaaggtgatggaggaagaaagggaagcgaatttggcagagattgaaaaacagcaaacgcaatcagataatgcgcaaaaagatccgcccaaacaaacaacaggagataaaaaggtcgtgtttatctatcacacgcacaataccgaatcatatctccctctattaaaaggcgagaccgatcctgacatggcgcgccattctaaagccaatgtcacgcttgtaggagatatgttcggacaagcgcttgaatcccagggaatcggagccacagtgaataaaaccgatatacagtcaaaattgaataaaaaaggcttaaactatgccaggtcctatgatgaatcaaggccggtcgtgaaagacgcccttgcttcaaacaaaaatttgcaatatatcattgacatccacagagactcacggcgcaaaaaagacacaaccgcaacgattaaaggaaaaagctatgccagggtagcctttgtcgtcgggaaaaaaagcaaaaacttcgaagaaaactataaaattgcgagtgagcttcataaactgatggagaaaaaataccccggacttagcacaggtgtcttttccaaaggctcgccaggcgataatggtgtttacaatcaggatttaaccgatagagcgcttttgctcgagtttggcggagtagataataatctcgaagagctgcagcgtgcggctaacgcggccgcggacgtattcagcgaaatgtactgggatgctgaaaaggtcaacgcagcgagcggggagacgaaaaaacaataagaaataggtggttgatttgattgcatactttggaaaatgcttactgcttgtcacgatcatgtttttaggcgttctgttcggcatgcagcaggcaaacaacgggatgctgagtatgaaaggctatcatgacccttcactgaggggggcgtttacgctcaccgacggaaaagataatgaaaaagaagcctcaatcctaggagaaacagtcacggcaaaagatttagaagaaaaacaaaaagagctggaaaaggtggagacattcaatatgttttcaaaagccggacaagcgctttcgaacaccgtaaccaatactgcccagtcaatgtatgaatggatacgggatatgaatcaataagtacgtgaaagagaaaagcagcccagatatgatagggaacttttctctttcttgttttacattgaatctttacaatcctattgatataatctaagctagtgtattttgcgtttaatagtaggagtgatagattgtgacagataaagaaaagcgtttagagaggcaatcgagaatacggaatttctctatcattgcccatattgaccacggaaaatcgaccttagcggatcgtattttagaaaaaacgtcggcaatcactcaacgagaaatgaaagaacaattgctcgattctatggatcttgaacgtgagcggggcataaccattaaattaaactctgttcagcttaaatataaagcaaaagacggagaagaatatatctttcatctaatcgatacgccgggacacgtcgacttcacgtatgaagtatcccgaagccttgctgcctgcgagggagcgattcttgtcgtggatgcagcccaggggattgaagcgcagacgctcgccaatgtctacttagcgcttgacaacgatcttgaaatccttccggtcatcaataaaatcgaccttccgagcgccgagcccgaacgtgtgcgccaagaggtagaagacgttatcggccttgacgcatcagaagccgtgcttgcttcagcaaaagccggtatcgggattgaggagattttagaacaaatcgtagaaaaggtgccagctccgaccggagatccggaggcgccgctcaaagcgctgatcttcgactcgctttatgacgcctaccgcggtgtcgtggcttatatcagagtcgttgaaggaacggtaaagccgggacaaaaaatcaaaatgatggcaaccggcaaagaattcgaagtaacagaggtgggcgtgttcacgccgaaagcaactccgacaaatgaactgacggtcggtgatgtaggcttcctgactgcctcaatcaaaaatgttggtgacacacgtgtcggtgatacaataacgagcgctgccaatcctgcagaagaagcgctgccgggataccgcaagctaaacccgatggtgtactgtggtttgtatccgattgatacagcgaagtataatgatttaagggaagctcttgaaaagcttgagctgaatgattcctcccttcaatatgaagcggaaacttcgcaagcgcttggattcgggttccgctgcggatttttaggcatgcttcacatggagatcattcaggagcgaattgagcgtgagttcaacatcgacctgattacgacagcgccaagcgttatctatgacgtgtatatgacagacggcgaaaaggtcgttgtcgacaacccgtccaacatgccggatcctcaaaagatcgaaagggttgaggagccatacgtaaaagcgacgatgatggtgccgaatgactatgtcggcgctgtaatggagctttgccaaggaaaacgcggcaatttcattgacatgcagtatttagacgcaaaccgtgtcagcatcatttatgatatgccattagcggaaatcgtatatgagttttttgatcagctgaaatcaagcactaaaggctatgcgtcctttgattatgaactgatcggctacaaaccgtccaagcttgtgaaaatggacattatgctgaatggtgaaaaaatcgatgccctttcctttatcgtgcatcgtgattacgcatatgaacgaggaaaagtgatcgttgaaaaactgaaagaactcattccgcgccagcagtttgaagttccggtacaagccgcaatcggccagaaaatcgtggcccgatccaccataaaagcaatgcgtaaaaacgtattggctaaatgttacggaggggacatctcgcgtaaacggaaacttcttgaaaaacaaaaagaaggaaaacgccggatgaagcaggtcggctcagttgaagtgccgcaagaagcatttatggcagttctgaaaatggacgacagtccgaaaaaacaatagaagccgccgcagtcttgtactgcggcttctttctgtaaagaaggtgaatccgttgaaatcagcttatatccatatcccattttgtgagcatatttgccactactgcgatttcaataaatattttattcaaagtcagccagtcgacgagtatttaaacgcactcgaacaggaaatgataaatacaatagcaaaaactgggcagcctgatctcaaaacaatctttatcggaggaggcacgccgacctccctgtctgaggaacagcttaaaaagctgatggacatgatcaaccgcgtactgaagccctcaagcgacttatcggaatttgcggttgaagcgaatccggacgacttgtccgcagagaaattaaaaatattaaaagaagcaggcgtaaatcgcctcagctttggtgtgcaaacgttcgaagacgatctgttagaaaaaatcggccgagtgcacaagcaaaaagatgtattcacctcttttgaaagagcgcgggaaatcggttttgagaatatcagtcttgacctcatgttcgggcttccggggcaaaccctcaagcatctggaacattccataaacactgctttatcattggacgccgagcattattccgtttactcccttattgtagaaccgaaaacggtattttataatttgatgcaaaaagggcggcttcatcttccgccgcaggagcaggaagctgaaatgtatgaaatggtgatgagcaagatggaagctcacggcattcatcaatatgaaatcagcaactttgctaaggcaggcatggaatctaagcacaatctaacgtattggagcaacgaacaatatttcggtttcggagccggcgctcacggatatatcggcggcacacgaacagtgaacgtcggacctgttaagcattacattgacctgatagctgaaaagggttttccgtacagagatacacatgaagtgacaacagaagaacagattgaggaagaaatgtttttaggtttgagaaaaacagccggtgtcagcaaaaaacgattcgcagaaaaatacggccgttccctggatggacttttcccaagcgtgttaaaagacctcgctgaaaaagggctgattcacaattcggagtctgccgtttatttgactcatcaagggaaattattaggcaatgaagtttttggcgcttttttgggtgagttataattgacatttttcttgtggtttgatacttttgttatagaattagcactcgcttattgagagtgctaacagaggtgatgatgatgttaacaaatcgtcagctgctgatcctacaggttataatcaacgattttattaaatcggcacagccggtgggatcaagaactctttcgaaaaaagatgaaatcacatttagctctgcaacaataagaaacgagatggctgacttggaggaattgggctttattgaaaaaacccattcatcctcagggcgtgttccgtcagaaaaagggtatcggtactatgttgaccatttgctgtcacccgtcaaactgacgaaaagcgacctggaccaaatccactcgatcttcaaagagaaaattttcgagctggagaagacagttcaaaaatcagcgcaaattttgtccgatctgacgaattacacatccatcgtactcgggccgaagctgagtgagaattaccttaaacagattcaaatcattccgattcagcctgatatggcggtagcgattctcgttaccaatacggggcatgtggaaaacaaaacgattaactttccgaccaaaatggatctgtctgatattgaaaaactggtcaatatactgaacgaccgtttaagcggcgttccaatggatgaactgaatgagcgcatatttaaagaagttgtcatgtacctaagacagcacattaagaactatgacaatatactcgacgcgcttcgttcaacctttcattccacaaatcacgttgaaaagttgttttttggcgggaaaatcaatatgctgaaccagcctgagttccatgatatcacccgagttcggtcgctcctttcattaattgagaaagaacaggatgttttaaagctggttcaatccccgcacacgggaatttcgattaaaatcggaaaagaaaacgactatgaagagatggaaaattgcagtctgattacggcttcttattccgtagaccagaagcagattggctcaattgcgattatcggcccgacccgcatgaattattccagggttgtcagcctgcttcagcatgtgacttcggacttgtcaaaagcattaacaagtctgtatgatgaataagggaattttggcaaattttatcgaagggcagcacctgtccttctccttacactttgagggaggtgaacacaatgtcagaagaaaaacaaaccgttgaacaaaacgaaacagaagagcaagaaatcattgaagaacaagctgccgctgatgaacagcaggaagaaacaaatgaaagcgaacttcttcaaaaccaaattaacgaattgcaaggtttgcttgaggaaaaagaaaacaaacttttgcgtgttcaagcagactttgaaaactataaacgacgcagccgtttagagatggaagcgtcccaaaaataccgttctcaaaatatcgtgactgatttgctgccggctcttgacagctttgaacgagcgcttcaggttgaagccgacaatgaacagacgaaaagtttgctccagggaatggaaatggtccaccgtcagctcgtagaagccttgaaaaaagaaggcgtcgaagccatcgaagctgtagggcaggaatttgatcctaatctgcaccaagctgttatgcaggctgaagacgaaaactacggctccaacattgttgttgaggaaatgcaaaaaggctataagctgaaggatcgcgtcattcgcccttccatggtcaaagtgaatcaataattacatagcaggaggttattcaagtgagtaaagttatcggaatcgacttaggaacaacaaactcatgtgtggcagtgcttgaaggcggcgagcctaaagttattgctaacgctgaaggaaaccgcacaacgccatcagttgttgcgtttaaaaacggcgaacgtcaagtaggggaagtggctaaacgccaatctattacaaaccctaacacaattatgtcagtcaaacgtcatatgggtactgattataaagttgaaattgaaggaaaggattacactccacaagaagtgtctgctatcatccttcaacaccttaaatcatacgctgaaagctatcttggcgaaacagtatcaaaagcagttatcacagttcctgcatactttaacgatgctgagcgtcaagcaacaaaagacgctggtaaaattgcaggtcttgaagtagaacgtatcatcaacgagccaactgcagcagcgcttgcatacggacttgataaaacagatgaagatcaaacgatcctagtatacgaccttggcggcggtacattcgacgtttccatccttgagcttggcgacggtgtattcgaagttcgttcaactgccggcgacaaccgtctgggcggggacgattttgaccaagttatcatcgatcatcttgtgtctgaattcaaaaaagaaaacggcattgatttatcaaaagacaaaatggcgcttcagcgtttgaaagacgcagctgaaaaagcgaaaaaagatctttccggcgtatcttctacgcaaatttctttaccgtttatcacagctggagaagcaggaccgcttcaccttgaacttacattaactcgcgctaaattcgaagagctttcttctcatttagtagagcgcacaatgggtcctgtccgtcaagcgcttcaagatgcaggactttctgcaagcgaaatcgacaaagtcatccttgtcggcggatcaactcgtatccctgccgtacaagaagcaatcaaaaaagaaactggaaaagaagcgcataaaggcgtaaacccggatgaagttgtagcgcttggtgctgcgattcagggcggcgttatcacaggtgacgtaaaagatgttgttcttcttgacgttacaccgctttctctcggtatcgaaacaatgggcggcgtgtttacaaaactgatcgaccgcaacacgacgatcccgacaagcaaatctcaagtgttctcaactgctgctgataaccaaacagctgttgatatccatgttcttcaaggtgagcgcccaatgtctgccgacaacaaaacactcggccgcttccagcttactgatatcccgccagcaccgcgcggcgtgcctcaaatcgaagtttctttcgatattgacaaaaacggtatcgtaaacgtaagagcaaaagacttaggcacagggaaagaacaaaacattacaattaaatcttcttcaggtctttcagatgaagagatcgaacgcatggttaaagaagcggaagaaaatgctgacgctgatgcgaagaaaaaagaagaaatcgaagtccgcaacgaagcagatcagcttgttttccaaactgagaaaacattaaaagatcttgaaggcaaagtggatgaagaacaagtgaaaaaagccaacgatgccaaagacgctttaaaagcagcaattgagaaaaacgaatttgaagagatcaaagcgaaaaaagatgagcttcaaacaatcgttcaagagctttctatgaagctttatgaagaagctgctaaagcacagcaagctcaaggcggagcaaacgctgaaggcaaagcggatgacaacgttgtcgacgctgaatacgaagaagtaaacgacgaccaaaacaaaaaataagttctttttagtgtcagccccgctttcggagctgaccgaaaagaacacatttcataatctgattcaatgattagaaagtcaaagtcaggcatctcttggctttgactttttttcttgcccgggataaaaggaattgaaaaatcataattcaaaatgatacaatctaatttatgtgagaaattcgggagagtgaagcgagatgagtaagcgtgattactatgaagtgctgggagtaagtaagagcgcttcaaaggatgaaattaaaaaagcttatcggaagctgtcaaaaaaatatcatcctgatattaacaaagaagccggatcagatgaaaaatttaaagaggtaaaagaagcgtacgaaacactgtcagatgaccaaaaacgtgcgcattacgatcaatttggtcacactgaccctaaccaaggcttcggcggcggaggttttggcggcggcgatttcggcggttttggtttcgatgatattttctcaagtattttcggcggaggcacaagacggagagatccaaatgctccgcgccagggtgctgatttacagtatacgatgaccctgtcgtttgaggatgcggctttcggtaaagaaacaaccatcgaaattccccgcgaggaaacgtgcgagacatgtaaaggctcaggtgcgaaacctggaacaaatccagaaacatgctcccactgcggaggctccggccagttaaacgtggagcaaaatacaccgtttggaaaagtcgttaacagacgggtctgccaccactgtgaaggtacaggcaaaatcattaaaaacaaatgtgcggattgcggcggcaaaggaaaaatcaaaaaacgcaagaaaatcaatgtgacaattccagccggtgtagatgacgggcagcagcttcgtctctcgggacagggtgaaccaggaataaacggcggccctgctggggatttatttgtcgtgttccatgtacgcgcacacgagttcttcgagcgtgacggcgatgatatttactgtgaaatgccgttaacgtttgctcaggctgctcttggagatgaggtagaagtgccgacgctgcatggaaaagtgaaattgaaaattccggccggtacacaaacaggaacgaaatttagattaagaggcaaaggcgttcaaaatgtcagaggctatggacagggtgaccagcatatcgtcgtccgcgtcgttacgccgacaaatctgactgataaacaaaaagacattatccgcgaatttgccgaagtcagcggaaacctgcctgacgaacaggaaatgagtttctttgacaaggtaaaacgcgcgtttaaaggtgattaattattggatgaggagttggtagttttgaaatggtccgaattaagcattcacacaacacatgaagcggtcgaacctatctcaaatatattgcatgaagctggtgcaagtggggttgtgatagaggacccgcttgatttaattaaagaacgtgagaatgtgtacggggaaatctaccagctcgaccccaatgattacccagatgagggtgtcattgtcaaagcatatctgccggttaacagttttctgggcgaaactgtagacggcatcaaagaaacgattaataatctccttctttacaatattgatttgggcagaaaccacatcactatttctgaagtaaatgaagaagagtgggcgactgcctggaaaaagtattatcatcctgtgaaaatttctgaaaagtttacaattgtgccgacgtgggaggaatatacgccggtccatactgatgaactgattattgaaatggacccgggaatggctttcggcacagggacacatccgacaaccgtactctgcattcaggcgcttgaacgctttgtgcaaaagggtgataaggtgattgatgtcggcactggttcgggaattttaagtattgcggctgcaatgcttaaggctgaatcggttcatgcctacgatcttgatcccgtggctgtagaaagtgcacgccttaatctcaagctgaacaaagtcagcgatattgctcaagtgaagcaaaacaatttgttagacgggattgaaggggaacatgatgtgattgtggccaacattttggctgaagtcattcttcgctttacttcacaagcgtacagcctgttaaaagaaggcggccactttattacgtcaggaatcatcggtcataaaaaacaagaagtaaaagaagcactggaacaagctggctttaccattgtagaaatcctttcaatggaagattgggtcagcattattgcgaaaaaataacagttagtaggtgtcacagcgtatgcaacgatattttatcgagctcacgaagcagcaaatagaggaagcgccggctttttcgattaccggcgaagatgttcatcatattgtgaacgtgatgagaatgaatgagggagatcagattatctgctgctctcaagacggcttcgaggcaaaatgtgaacttcaatctgtttccaaagataaagtgtcctgccttgtgatagaatggacgaataaaaacagagagcttccgataaaggtctatattgcgagcggccttccgaaaggagataagcttgaatggattattcaaaaggggactgagctcggagctcatgcctttattcctttccaagccgcgcgttctgttgtcaagctggatgacaaaaaggcaaagaaaaagcgggaaagatggacgaaaattgcaaaggaagcggctgagcaatcgtaccgtaacgaagtgccgcgagtgatggatgtccattcttttcagcagcttcttcaaaggatgcaggatttcgataaatgtgtcgttgcatacgaggagtcatcgaagcaaggggaaataagcgcattcagcgcgattgtaagcagccttccgaaaggatcatctctattgatcgtatttggtccagaaggcggtttaacagaagctgaggttgaacggctcacagagcaagacggtgtgacgtgcggccttggaccgagaattttaaggacagaaaccgctccgctatacgcattgagcgcgatttcttatcaaacagagttattaagaggtgatcagtaatggcaactgttgctttccatacgcttggctgtaaagtcaaccattatgaaacagaagcaatctggcagcttttcaaagaagcgggctatgaaagaagagactttgaacaaacagctgatgtatatgtcattaatacatgtacggttacaaatacgggagataaaaaaagccgccaagtgatcagacgcgccattcgtcaaaatcctgacggtgtcatctgtgtcacaggctgctacgcgcaaacctcacctgctgagattatggcgatccccggtgtcgacattgtagttggaacacaggaccgtgaaaaaatgcttggctacattgaccaataccgagaagaacgccagccgattaatggcgtcagcaacatcatgaaagcaagagtatatgaagagcttgatgtgcctgctttcacggaccgcacaagagcgtcattaaaaatacaggagggctgcaataatttctgcacattctgtatcattccgtgggcgagaggcctgctccgctcccgcgatcctgaagaagtcattaaacaagcgcagcagcttgttgatgccggatataaggaaattgttcttacgggtattcatacaggcggctacggcgaagatatgaaagattacaacttcgcgaagcttttgagcgaattagacacccgtgtggaaggcgtgaaacggatcagaatttcttccatcgaagccagccaaatcactgacgaagtgatcgaggtcttagaccgctcagataagatagtgaatcatctgcatattcctatccaatccggatcaaacacagtgcttaaacgaatgagacgcaaatatacaatggaattctttgcagaccgtttaaataaattgaaaaaagcactgccaggcttagctgttacttctgatgtcatcgtcggattccctggagaaacagaagaagaatttatggaaacctataactttattaaagaacataaattctctgaactgcatgttttcccttacagtaaacgtacaggaacaccagctgcgcgaatggaagaccaagtggatgaaaacgtgaaaaacgaacgtgtgcaccgcctgattgctctttctgaccagcttgcaaaagaatacgcttctcagtatgaaaatgaagtgcttgagattatccctgaggaagcgtttaaggaaacagaagaagaaaatatgtttgtcggttacacagacaattatatgaaggttgttttcaaaggtacggaagatatgatcggcaaaatcgtaaaagtcaaaatcctaaaagcaggttatccttacaacgaaggacagtttgtccgtgtggttgaggatgaaataactgaacacatgcgtttgtcttcttaacctaaaaaatcggtgcattaaaatgtaccggttttttatttagccgggataagaaggtgaatcaagcggtaaaacaagtttgtaagcggaagaaataaaagagctgttactacattaaataaaaggctgaaatgagcaatcctttgggcaggatcgggtgataactgctctacaaagccggtcgctgcggtcagaaaaggcaatactagagccacccctagcacgttaaataccacatgcgcatacgctgtctgtttcgccgcatatccaccggatacagcagccatgacagctgtaatgcatgtcccgatattggatccgagtacgacgctcatcgcctgtgtcagtccgataatcccttcattcataaaactcatcaaaatgccgatacagacagaactggagtgaatgatggcagttaacaccatgccgatgagcaaagcggaccagtttgaatcgttaacatggtatagaacgtcggctcccgttttcagcttcgtcagcggcccggcaaggtggctgaatccgctgatgcaaaagaagatgatgcccagtccgaggaagcttgttcccagctgtttcaaaggatacctgccagtcagaaaaaacaataaacctcctattaaaagaacccaaatcaaaatatccattttgatagcaataaattcagttgtaaaagtagagccaacatttgtccccagaatcatcggtatcgtccgcttaaaagaaagaacgcccgcacttacaaagccgatgacaatgaccataaaggctgaactgctctgaagtatccccgtaaatacaatgctgataagaaacgcttttaacggatggtctgtaaataaaagcaaacgatcttcaatttttgagtacgccatagaaattaagccttttcgaagcatgttcatgcctgtgagaaagaataatataagagcagtaaagctaatcagaattaacatcctattcaccaacccctttctatcattatatagacaggcagtcgcactcatgacggaaaagtgaactcacttagttgacctgactgatggcttatattataatgtcaaagtacatgtttatatgtgtaacttaaaggtagtcgattggtgtattcggagggagggaaagagaatgtcaaaaacggtcgttagaaaaaacgaatcgcttgaagatgctcttcgtcgcttcaaacgcagtgtatcaaagacaggtactttgcaagaagcaagaaagcgtgaattttatgaaaaacctagcgtaaagcgcaagaaaaagtctgaagctgctagaaaacgcaaattctaaaagagggtggatttatgagtcttcttgagcgtctcaaccaggatatgaagctgtatatgaaaaaccgtgagaaagacaaactgactgtcgttcgaatggttaaggcttcacttcaaaatgaagcaattaagcttaagaaagacagtttgaccgaggatgaggaactcactgtcctttctcgtgaacttaagcaacgtaaagactccctccaggaattttcaaacgctaatcgtttagatttagtagataaagttcaaaaagagctggacattttagaagtttatttacctgagcagctgtcagaagaagagctgcgtacaatcgtaaatgataccatcgcggaggtcggtgcgagctcaaaagcggacatgggcaaagtgatgggggcaattatgcctaaagtaaaaggtaaagctgacggaagtttaattaataaacttgtgagcagtcaactgtcttaaatggcaaagaaaaggacatctttctaagagagatgtctttttttatacataaaaaaatgaaacctttgatacatttgttacgtatgaagagaaggcacttattataaaaggaaggagggatacaccgcccttgcttcaaatcaaaggattccgtgctgctcttttgggtatatttttgctttctttattaggcgtacagctgaacgcaaaagcagaaaagcaaactgtttatgtgattccggttgaaaaaaatgtcgaacagggtctcgtctcgtttttgtcccgttcgttacaagacgcaaaggatgcacatgcagaccatattattcttgatatcaataccccggggggattggtcaaatctgctattgatatggccgatttgataaccgatagcgagatccccgtaactgcatatgtcaacaaacgcgcgttgtctgctggtgcatatattgcacttcaagcagatcacatttatatggcgcctggcggaaaaatgggagccgccgcgattgttgatggccaaggcaatgccgctgaccaaaaagctcaatcactttggctggcagagatggaagatgccgcagtgaaaaataaccgcgatccaaaatatgcgctcgcaatggctgacccagatatagatgccaaggaagtcggcgcgcctaagggagatctgctgacacttaacgcagacaaggcaactgaggtaggctattcagaaggcactgctgacaatttgtccacgctcgtaaagaagcttgggttcgaaaaagcgcagatcagctacgcaaaggagagctttgcggaaaagacagcaaggtggctgacgaatccggtcattgtccctattctgctgacaatcgcttttttaggtctgacggtggagcttttttccccgggtgtcggcctccctggaacggctggactcattgcgttattgctgttcttctacgggcatctcgcagcaggccttgccgggtatgagacggttctcctctttatagcaggggtgattctcattctgcttgagatttttcttcccggaggaatcattggattactgggcttaggagcgattattgcgagcctgtttttagccgcggggagcttcactgtcatggcggtttctctcttgatcgcctcagctgtttcgattacagcttttattttactgacaagggtgttgggaaagcgtatgaaattctttaagaaattgatattaaatgattctacaaacacggagagcggctacgtttcaaatcaaacgcgcacggacttaatgggaaaagtgggtataacctttacaccgctgcgtccttccggtaccgtgattattgatgatgaacgccttgacgttgtttcggagggatcgtttacagaaaaagataaaaaagtaaaagtgattaaagtagaaggctcacgcattgtcgtgagagaaatttaaatagaaacgaggagaagttatatggatccgtcaacacttatgattctggcaattgtcgcagtagcgatcattgttttggcagtattttttacatttgtgcctgtaatgctttggatttcagctttggcagccggagtgaaaatcagcattttcactctagttgggatgaggcttcgccgtgtcattccgaatcgggttgttaacccgctgattaaagcccataaagcgggacttaatgttggaacaaaccagcttgaaagccactacctggctggaggtaatgttgacagagtcgtcaacgcgcttatcgccgctcagcgagctaacattgaactcacattcgagcgctgtgctgccattgatcttgcaggccgggacgtgttggaagctgttcaaatgagcgttaatcctaaggtgattgaaacaccgttcattgccggtgttgcaatggacgggattgaagtgaaagcgaaagcgagaatcacagtaagagcgaatatcgagcgcctcgtcgggggagcaggggaagaaaccattgtagctcgtgtaggtgaggggatcgtttctacaatcggttcatctgataatcataaaaaagtgcttgaaaaccctgacatgatttctcagacagtccttggaaaaggattggactcaggaactgcgtttgaaattctctcaattgatattgcagatgtagatatcggcaaaaacatcggtgcaattttacaaaccgatcaggctgaggctgataaaaacatcgcgcaggcaaaagcggaagaacgacgtgcgatggctgtcgctcaagaacaggaaatgcgtgcccgcgtagaagaaatgcgcgcgaaagtagtagaagccgaggcggaagtgccgcttgcgatggcagaagctttgcgcgaagggaatattggcgtcatggattacatgaatatcaagaatatcgatgctgacacagaaatgcgtgattcattcggcaagctgacgaaagacccttcggatgaagaccgcaaatcataatctctctaagaagggagaacgctgatggaagatttactgaccaatccgcttattattgcagcgatcatcggaatcatttctgcgattttcggcaaaaagagcaaagaagaaaagcaaaacagccaaaaaagaaaaaaacctcaacacgtgcaatctgcttcttctcaaaagaagcagtcaaaagaagatgcccctgcacctatccctaaccgtatggaacaggcaagacgggaagcggaagaaagacgcagggaaacagcaagaaacctgaaagggctggaacgagatcttgctgctgccaaacaaaaaacagtatacacaaaacaaaaaatgcttcaggtgaataaggacaccgtcgtacagggaatcgttctaggagaggtgttcgggcctccacgggcgaaaaaacctcaccgtacgatgcgctcagcccgtaaaaattaaagtgttagaacctcctttcaaatcatacatatgagatgaaagggggttctttttgtatggggcaaagaaagaatcgtatgaaagcttggctgacaagagcattggaaattcccccggacgttatgatggatctgccgaggattacaatggttggcagacttcatatctacatagaaaaccacagaggccttttgcttttcagtgagaatgaagtgaggctgatgctgaagcagggccagtgcatcatatctggtaaaaattttgtcatcaaggcgattcttccggaagagatacttttggagggtacgattgatgtcgttcgatatgttgagtcataaagccgagggggaaatgttgtgaaaaataaatggctgtcttttttttcgggtaaggtccagcttgaattgacgggaagagggattgagcggctccttaatgaatgcacaagacaggggattccggtctttcatgtcaaaaaaaagaaagaagccgtatcgttatatatacagcttcaggatgtacatgcctttcggcgggtgagaagtaaatttaaatgtaaagcccgatttatccatcggaagggttttcccttcctgttgctgaaatcaaagctgaatatagggtttacgatcggttttgcgatttttttcatccttttgtttttgctgtccaatatggtgtggaaaattgatgtgacaggcgctaagcctgaaacagaacatcaaatgaggcagcatcttaatgaaatcggcgtcaaaaagggccgtctgcagtttttaatgatgtcgcccgaaaaaatacagaaatcattaaccaatggaatagacaatatcacttgggtcggagttgatctgaaggggacgaccattcacatgaaagttgtggagaaaaatgagcctgaaaaagaaaagtatgttagcccgcgcaatattgtcgccaaaaagaaagcaaccattacgagaatgtttgtgcaaaaaggacagcccatggccgccatacacgatcatgttgaaaaggggcagctgcttgtttcgggactgatcggcagcgaagaccatcagcaggaagtcgcctcaaaagcagaaatttacggagaaacctggtatagatcagaagtgacagtcccgcttgaaacattatttaacgtctatacgggcaaagtaaggacaaagcacaagctttcttttggttctttggcaatcccgatctgggggatgacgtttaaaaaagaggaattgaagcatccaaaaacagaacaagaaaagcattcgcttcattttctcggatttaagctccctgtatcctatgtcaaagagcaaacgagagaaagtgaagaggctttgcgaaaatatacgaaagaagaagcagttcaagaaggcattaaattgggtaaacaggatgtagaggataaaataggcgaaaacggcgaggtgaaaagtgaaaaagttttgcaccagactgttgagaatggtaaagtaaagttgattattctctaccaagttatagaagatatcgttcaaaccacacctattgtcagggagactgaagaatgacagaacatttacttgcgatgaatcaaaaactgaaaaacccggacgaggcgctttcactcttcgggaaccaagattcttttttgaaattgatggagaaagatctgaatgtaaatatcattacgcgcggcgagacgatttatgtttcaggcgatgatgaatcgtttcagattgcagacaggctgctgggatcgctcctcgctttaattcgcaaggggatagagatctctgaacgtgatgtgatttacgccatcaaaatggcaaagaagaatgaacttgaatactttgaaagcatgtatgaagaagaaattacaaaaaacgcaaaaggcaaatcaatccgtgtaaaaacaatgggacagcgggaatacgtggccgctatgaagcggaatgaccttgtattcggcattggtccggcgggaaccgggaaaacgtacctggctgtcgtaaaagcagtccatgctttaaaaaacggacatatcaaaaaaatcattttaacaagacctgccgtggaagccggtgaaagccttggttttctcccaggtgacctaaaagaaaaagtagatccttatttgcgcccgctgtatgacgctctccatgatgtgcttggggcagatcatacagaacgtctgatggaaagaggcatcattgaaattgctccgctcgcatatatgagggggcggacgctcgatgatgcttatgttatacttgatgaagcacagaataccacgcctgctcaaatgaaaatgtttttgacgagactgggttttggctctaaaatgatcattacaggtgacgtcagccaaattgatctgccgaaaggcgtcaaatcgggacttgcagtagcgaaggagatgctgaaaggaatagacggcatttctatgattgagctggaccagacagacgtggtcagacatccgcttgttgcgaaaattattgaagcatacgataagcaaaattaatgctgaatgacccgatcgcgcgttatcgggtcatttttatgattgcttatgggcttgatgtttcaagaggaggttcttgtgttgaaaaagaaggctaagaccaaaagcagctcgaaaaaatggagcagttttaaaaatgcccgctccatgcatgtactgctgtatcttctgctggctgccattatgtttgctttgctttttgtacatgttaagccggaaacacttgatttagacctgttttcagtcagcgacaagaccatttacgctccggcaaccgtggaagatcaaaaagccacagaggaaaaaaagcaagccgctgaggacgcggttgaagatcaatatacattaaaaaaagaatatacagacaatcggattgaccttgtgtcatcaatattcgacagtattagtgaagtgaaaaaatcatcggaagaaggcagtaaatcaccatcggaaaaatcaatggtcaaatctgtaaaggacaaattgacatcagatgtgaatgattctatatcggaggattccatcaagacattgctgaaagcagacagtgaagacttttcttttgtcagagatacggtcattaccgcagtaaatacggtcatgagcagtgaaatcccttcggataaactatctgatgcaaaggataaggtagaaaaagagctaaagagcaattctattccgtctaaatacttgggagccgcgacagaaatcgggcgttttgctattattccgaattacgtcttcgatccgaaagcaacagaggcaaaacggcaggaagcctcagataatgtccagcaggttcaaatcaaacaggggcaagtgctcgtggaagaaaatgacctcattgatcgggaagtgtacaggaaacttgagctgaccgggttattaaataactcaaatctttttaaaccgatcagcgggctattgattatgatcggacttttcattgcaacacttgtatattattttgaaaaacagaaacaaaatctgaagtttaaaaaccaatccattctgttattctccataatcacaacacttttgcttgtgatcatggaggttgtcagtttgtttcagaagatggagtataataatatcggctatctggtccccattgcggccggcgccatcttaatcaaactgctgatgaatgaacgcattgccattttgggaagtatcattcttgcgatttgcggaagtatgatgtttaatcagggtgtgacaggaacattcaattatgtcatagggatttattatttgatcagcggcatttcaggtgtattatttttaggaaaacacaatgcaagatcaaagattttgcagaccggacttttcgtggcgtttattaatatggttgtcgttctgtccttattattgatccagaacactgcgctgtcgggtcttgagatcggcacgttaatgctcatgggggttgtgtcggggtttgcttcatctgtattgatcatcggcctcatgccgttttttgagacgggctttggcattttatccaccatgaggctgctcgagctgtctaatcctaaccatccgcttttgcgcaaaatactgacggaaacaccaggtacatatcatcacagtgtaatggtcgccaatttatcagaggcagcctgtgaagcggttggggctaatggtttgctcgcaagagtcggcgcatattatcacgatctcggaaaaacaaagcgaccgcaatattttattgaaaaccaaatgaatatcgacaatccgcatgacaagctgtcacctcagttgagtaaaaatattatcatttcgcatacgactgacggtgcgaatatgctgagaagctataaatttccgaaagagcttgtcgatattgctgagcagcatcatggaacctcgcttttaaagtttttttactataaagcgaaggaaaaaggcgaccagattacagaggaagagttccgttatccgggaccgaagccgcagtcaaaggaagccgcaattatatcagtggccgacagtgttgaagcggccgtcagatccatgcataatccaaatcctgaacgaattgaaaagcttgtccggggtattatatccgataagcttcaggacggacagttcagtgaatgcgatttgacatttaaagagctggatacaatcgcaaaaacactctgtgcaacattaaaaggaattttccactcccggattgaatatccggaggctactaagaaggtgaaatagatgagtttactgattgatatcgttgatgaaacaggaagcgtctcagaagagatgctcaaagaagtagaaaatctgcttcaatttgccgctgagcgtgaaggcgttcaggatcaggctgaagtttctgtcacgattgtttccaatgatgacatacatcagattaacaaagaataccggggaaaggatgctccgacagatgtcatctcatttgctcttgaagaagagggagaaggcgagatcgaaatcgtgggcgccgaaatgcctccggttttaggtgatattatcatcagtgccgatcgcacaagagagcaggcagaggagtataatcattcttttaaaagagagctcggatttctagctgtacacggatttctgcaccttttaggatatgaccatatgacgaaagaggaagaagaggagatgtttactaagcaaaaggaattgctggacgcttatggactcaaaagatcatagaaatgagctgaagcgattcttcaaaagcttcgtgcatgcaggccggggcatctgggaaacagcgcggacggagcggaatttccaatttcatgccgcagccgcctgcgctgttctcatttgcggcttccttgtagagctcagcatgattgagtggatgattatattccttttgataggcggtatgttttcgcttgagcttttaaatacagccattgaacatacggttgatttaataactgacaaacatcaccctcttgctaaagcggccaaggacgctgccgccggggctgtttgcgtttttgccgtgatttcgtgtatcattggtttacttatttttttgccaaagctgtaatggctgaaaattcttacatttattttacatttttagaaatgggcgtgaaaaaaagcgcgcgattatgtaaaatataaagtgatagcggtaccattataggtaagagaggaatgtacacatgaacagacaagaattaataacagaagctttaaaagcgcgtgatatggcatatgcgccgtattccaaattccaagtaggagccgctcttcttaccaaggatggaaaagtgtacagaggctgcaacattgagaacgcggcatacagcatgtgcaattgcgccgagcgtaccgctttatttaaagctgtttctgaaggggaaacagagtttcagatgctggccgttgcggctgacacccctggaccggtatctccgtgcggagcctgccgccaggtgatttctgagctttgcacaaaagacgttattgtcgtactgactaatttacaaggacaaataaaagaaatgactgtggaagaattattgccaggcgcattttcatcggaggatttacatgacgaacgaaagctttaaatcaggatttgtatccattattggaagaccaaacgtaggaaaatctacatttttgaacagagtcattggacaaaaaatcgcgatcatgagcgataagccccaaacgacgagaaacaaggtgcaaggagtactgacgacaggcacatcacaaaccatttttattgacacaccagggattcataaacctaagcataagcttggggactttatgatgaaagtggcgcaaaatacattaaaagaagtcgatttgatcttgtttatgatcaatgctgaggaaggctacgggaagggcgacgaattcatcattgagaaattggagaagatgtctacgcctgtattcttaatcgtaaacaaaattgataaaattcatcccgaccaattgcttctgctaattgacgaataccgcaaacgttatccttttaaggaaattgttccgatttctgctttagaaggaaataacatcgaaacattgcttgctcaggttgaagcgtatttgccggaagggccgcaattctatccgagtgaccaggtaactgaccaccctgaacgatttatcatttctgaattaatcagggaaaaggtgctgcatttgacgagagaagaaatcccgcacagcattgcggtggccatcgaatccatcaaagggcaggacaacggttctgtacacgtagcggcaacgattgtggtcgagcgggattctcagaaaggcatcgtgatcggtaaaaaaggaagccttctaaaagaggttggaaaaagtgcgagagcggatattgaagcactattgggctcccgtgtctaccttgaattgtgggtgaaagtgcagaaggactggcgtaataaaatgtcccagcttcgcgattttggctttagagaggacgaatattaatctctagctgtgtgtgtcattatctcacaggaacagggatacattagcaaattttgtttaacatgaaatggaggacatctggtcaagataaaggtaagaatttggagtttaggtaagctagtttaactacagaaaggtgggtttcttgtgttgaattttacctggaacgtattttctcaaacaggaaatgttgatacgtatcttctttttaaagaactggaaaaagagaacatggaaagacccgaagaactagaagatgagctagcccgatttgattatccaattttataaacctcttggccgctcctgcttgaggaaggtgcggaaatgctgacaaaatgtgaaggaatcgttcttcgcacaaatgattacggagagacgaataaaatcgtaacattactgacaagagaacacggaaaaataggtgttatggcacgaggcgccaaaaaaccgaacagccgtttatcagcagtcagccagccctttttgtatggttctttcttaatgcaaaaaacatcgggcctcggaacgcttcagcagggggaaatgatcctcagcatgagaggcatcagggaagacttgtttttaacagcatatgctgcctatattgctgaattagtcgacagaggcacagaagaaaaaaagccaaacccttatttatttgaattcatattagaatcattaaaacagctgaatgaaggaacagatccggatgttatcaccttcattgttcaaatgaagatgctcggtgtcatgggcctgtatcctgagctaaatcattgtgtacattgtaaaagccaagacggaacctttcatttctctgttcgtgataatggttttatatgccaccgctgttttgaaaaagatccttacaggataccgattaaaccgcaaacggcaaggctgttaagactcttttactattttgatctgtcgaggctcggcaatgtgtccttaaaagaggaaacaaaagctgaattaaagcaagtgattgatttatattacgaagaatattcgggattgtatttaaaatcaaagcgctttttagatcaaatggaaagcatgaaacatcttatgggtgaaaacaaaagttgacttttggtccatctttttatatgatcatttattataaaatatgttgcagtgagagaaagaagtacttgcgtttacctcatgaaagcgaccttagggcggtgtaagctaaggatgagcacgcaacgaaaggcattcttgagcaattttaaaaaagaggctgggattttgttctcagcaactagggtggaaccgcgggagaactctcgtccctatgtttgcggctggcaagcatagagacgggagttttttggttgctgccgcagtcaacttatgaaagaaaagtggaggtgcttgaaatgaatattcaagacatgattctaaccttgcaaaagcattggtccagtcagggctgtgtgcttatgcaggcttacgatgtagaaaaaggagccggcacgatgagcccgtatacatttttgcgcagtatcggtcctgagccgtggaaagtggcttatgtagagccttccagacgtccggcagacggccgctacggggagaacccgaacagactgtatcagcatcatcagttccaggtcattattaaaccgtcacctgataacattcaagagctgtatttggattccttgcgtgctcttggaattgatccgcttgagcacgatattcgctttgttgaagacaactgggagaatccgtctttaggctgtgcgggtctaggctgggaagtttggcttgacggaatggaaataactcaatttacgtatttccagcaggtcgggggattagagtgtaaacccgtttctgtagagattacgtatggaattgagcgtctcgcgtcttatatccaggataaagaaaacgtgtttgacttggaatggacctcagggtttacagtaaaagatttattcatgatggctgaatatgagcattctgtttatacgtttgaaacatcagacgtcgatatgctgttccaattgttcagcacatatgaaaaagaagcgatcaagcaaatggacaacggacttgttcatccagcatatgactatgtgctgaaatgctcgcacactttcaacctgcttgatgccaaaggtgcgatctctgttaccgagcggacgggctatatcgcaagagtgcggaatttagctagaaaagtagcaaaaacctactatgaggaacgagaaaaactagggttcccaatgcttaaaggggagggttcttctcatgagtaaacaggatttacttttagagatcggattagaggaaatgccggcgcgctttttgaatgaaagcatggttcagcttggcgacaagctgacaggctggcttaaagaaaaaaatattactcacggtgaagtgaaactcttcaatacaccgagacgtcttgctgtgttcgttaaggatgtcgcagaaaagcaggatgatataaaagaagaagcaaaagggcctgcgaaaaaaattgcccttgatgcggacgggaactggacaaaagcggcaatcggcttttcaaaaggccaaggcgcgaatgtggaagacctgtacatcaaagaagtaaaaggcatagagtatgtattcgtgcaaaaattccaagccggccaagaaacgaagtcgcttctgccggaattgagcggtttaattacaagcttgcatttcccgaaaaacatgcgctggggaaatgaagatttgcgttatatccgaccgatcaaatggattgtcgcattatttggacaggatgtcattccattttcgatcacaaacgttgagtctggacggacaacacagggacatcgtttcctcggacatgaagtgtcaattgaatcaccttcagcttatgaagagcagctgaaagaacagcatgttattgctgatcctagcgtccgaaagcaaatgattcaatctcagctggaagcaatggctgctgaaaacaattggagcattccagttgacgaagaccttcttgatgaagtgaatcatttagtagaatacccgacagctctttacggttcatttgaatccgagtttctgtcaattcctgaagaagtgcttgtcacgacaatgaaagagcatcagcgctacttccctgtcaaagacaaaaacggtgacctgctgcctcactttatcacagtccgaaacggcaacagccacgcgattgaaaatgtggcccgaggtaatgaaaaagtgctgcgcgcacgtttatctgatgcttcattcttctacaaagaagatcagaaactaaacattgaagcaaatgtgaagaagcttgaaaatatcgttttccatgaagagcttggttctcttgctgataaggttagaagagtcacatcaatcgcagagaaacttgccgttcgtcttcaggctgataaagatacattaaaacatgtgaagcgggctgctgaaatttctaaattcgaccttgtgacgcatatgatatatgaattccctgaacttcaaggaattatgggcgaaaagtatgcgagaatgcttggcgaagatgaagctgtggcggcggcagtcaatgaacattatatgcctagatcagcgggcggagaaacgccttctactttcaccggagctgttgtagcaatggcggataagcttgacacaatcgcttcattcttctctatcggcgtaattccgaccggttcccaggacccttacggactgcgccgccaagcaagcggtattgttgcgattcttcttgaccgcaactggggaatttcatttgaagagctgcttactttcgtacaaaccgataaagaaattgaactgctggatttcttcactcagcgcttgaaatatgtcttgaatgctgaacaaatcagacatgatgtcattgacgccgtgctggaaagctctgagcttgagccgtactctgcgctgcataaagcacaagtactggagcaaaagcttggtgcacctggttttaaggaaacagccgaagcgttaggccgagtgatctctatcagcaaaaaaggagtccgcggagacattcagcctgatctttttgaaaatgaatacgaagcaaaactgtttgatgcctaccaaacagcgaagcaaaatctgcaggaaaacttcagcaaaaaagattatgaggcggcgcttgcttcacttgcagccttaaaagaaccgatcgatgcttacttcgatcatacaatggttatagcggataatgagtcattaaaggcaaatcgtttagcgcaaatggtaagcttggcggatgagatcaagtcctttgcgaatatgaatgcccttattgtaaaataaagagagaaaaggcggttgctgtgtgatcggtaatcgtcttttccccatttataagttttttgtttgattacaagatatttacgttataatatggattattatttctttacatagctatgaagtgaaaaggtggtgagtacgatcgaactaaataaacggcaagaacatattttgcagattgtaaaagaaaacgggccgattacaggggagcatattgcagaaaagctgaacctaaccagggcgacattgcgcccggatttagccatactcaccatgtcaggattcctcgaggcgcgcccgagagtcggttatttctatacgggaaaaaccggcacacagcttttggcggataaactcaaaaagcttcaggtgaaagactttcaatctatccccgtagtgattcacgaaaacgtttctgtgtacgatgcgatttgcaccatgtttttagaagatgtaggtactctgtttgtggtggaccgcgatgctgttttagtcggggtgctttcacgaaaagacttgctcagagcgagcattggccagcaggagcttacatcggtccctgttcacatcatcatgacaaggatgccgaacattacggtgtgcagacgcgaggattatgtgatggacattgcaaagcacttaatagaaaaacaaattgatgcactgcctgtcatcaaagacaccgataaaggctttgaagtgatcggcagagtgacaaaaacaaatatgaccaaaatacttgtcagtttatctgaaaatgaaatcctataagattgcaaactaacggggggataatatgaataaccgcatcatctatgttgtatcggattccgtcggtgaaacggctgaattggtagtaaaagcagcactcagccaatttaacggatcggcggatgatactcatgtaagaagaattccttatgttgaagatataggcactatcaatgaagtgatttcacttgcaaaggcagacggcggcattatctgttttacactcgtggtgccggaaatcagagaatatttgatagccgaagcggaaaaagcaaatgttttatattatgatattatcggcccgttgattgataaaatggaaacagcctacggtttaacagcgaaatacgaaccggggcgggtgcgccagcttgatgaagattatttcaaaaaagtggaggccatcgagtttgcagttaaatacgatgatggacgtgatccaagagggattttaaaagctgatatcgttttgatcggcgtttcaagaacgtctaaaacaccgctgtctcaatatctcgcacacaaacgcctgaaggttgccaatgttccgattgtaccggaggttgatccgccggaagaactctttaacgttgatccgaaaaaatgcatcggtttaaagattagccctgataaactgaatcatatcagaaaagaacgtttaaaatcactcgggcttaatgataaagcgatttatgcaaatatcaacagaatcaaagaggaactcgagtatttcgaaaagattgtggatcggatcggctgccaggttgttgatgtttcaaataaagcggttgaggaaacagcaaatattatccatcatctcaaaacaaaaaacatataactcaggacgctctatcctgggtttttggctgtgccaaaagggaataatgaaaaacaatagcatctttgtgaagtttgtattataataaaaaattgtgataaaatgattaattttaggtttaaggatcgtgtgatacgaataaactattatgggtaagatgtcaagaatttctcccggaaatttttcgacaaattcatatacatccacaataataaaggatgtgcgattttgcttgcttttatgcaggagtttaatggagggatggagaattactcttcttaatgaacaagaaaagacgatttttgtcgatgctgatgcttgtccggtaaaagatgaaattttacaaacagcatccgagtatgaagttcaagttctttttgtcgcttcatttgaacattatcagctttccagaagcaatgaagaaaaatggaagtatgttgatcctcataaagaagctgctgatttatatatcgcaaatcacgtgaaaccgggagatattgttgtgacgcaggacatcggattagcatctctgctgttgaacagaaatgtctctgttatgtcggaaagaggtcgtctttacaaagaagacacgattgattttgccctagagggccgtcatttttccggcaaacaaagaagaaaaggcgtatatgccaaagggcctaaaaaattgaataaagaagatcgagaacgatttattacactgctgcaaaaaatcctgtcgaacgatgaagggattttgcactaaagcatcgaataatgtacgacggagtgttataagatgggaaatcggataccagatgaaattgtggatcaggtgcaaaagtcggcagatatcgttgaagtcataggtgattatgttcaattaaagaagcaaggccgaaactactttggactctgtccttttcatggagaaagcacaccttcgttttccgtatcgcccgacaaacagatttttcattgctttggctgcggagcgggcggcaatgttttctcttttttaaggcagatggaaggctattcttttgccgagtcggtttctcaccttgctgacaaataccaaattgattttccagatgatataacagtccattccggagcccggccagagtcttctggagaacaaaaaatggctgaggcacatgagctcctgaagaaattttaccatcatttgttaataaatacaaaagaaggtcaagaggcactggattatctgctttctaggggctttacgaaagagctgattgatgaatttcagattggctatgctcttgattcttgggactttattacgaaattccttgtaaagaggggatttagtgaggcacaaatggaaaaagcgggtctcctgatcagacgcgaagacggaagcggatatttcgaccgcttcagaaaccgtgtcatgtttccgatccatgatcatcacggggctgttgttgctttctcaggcagggctcttggcagccagcagcctaagtatatgaacagtcctgaaaccccgctctttcataaaagtaaactgctttacaatttttataaggcccgccttcatatcagaaagcaggaaagagcagtcttatttgaagggtttgctgatgtcatatcggccgtaagctcgggtgtaaaagaaagcatagccacgatgggaacgtctcttacagatgatcatgtcaagatcttgagaagaaacgtcgaagaaatcattctttgctatgactctgataaagccggttatgaagccaccttaaaagcttcggagcttctgcaaaaaaaaggctgcaaagtcagagttgcaatgattcctgacggattggaccctgatgattacatcaaaaaattcggcggggaaaaatttaaaaacgacattattgacgccagtgtcaccgtaatggcgttcaaaatgcaatatttccgaaaaggaaagaacctgtccgatgaaggcgaccgactagcttacattaaagacgtactgaaagaaatcagcacgctttcagggtctctagagcaggaagtctatgtaaagcagcttgcttcagagttttcgctttcacaggagtctttaactgagcagctgtctgttttcagcaagcaaaacaaacctgctgacaatagcggtgaaacaaaaacgcggcgagcgcatctgacaacaaaagcaaggcaaaaacgtttgcgtccggcgtatgaaaatgcagaaaggctgttactcgctcacatgcttcgagatcggagcgtcatcaaaaaagtgattgaccgggtagggtttcaatttaatattgatgagcaccgggcattagccgcctatctttatgctttttatgaagagggagccgagctgacgcctcagcatctgatggccagggtgacggatgatcatataagccagctcttgtctgatatattaatgcttcaggttaatcaagagcttagcgaagccgagttatcagattatgtaaaaaaagtgttgaatcaaagaaattggtcaatgataaaagaaaaagaggcggaaagagccgaagccgaaaggcaaaaagattttttaagagctgcttctctggctcaagaaatcgttacattgaaccgatctttaaaataactggagaactgatgaggagcatgtattggcaatgattccttgcggaggagcaaatagatcgcttaacctcatcatgaattgtcatttcattattcgcacattgttaaaggcagttcacatagaaaacgcctgaatggaccgaataagaatcataccgcttatagaattcgttgcaagctttggaaggagggatccataatggctgataaacaaacccacgagacagaattaacattcgaccaagtaaaagagcaattaacagagtctggtaaaaaacgtggcgttttgacatatgaagaaattgctgagcgtatgtccagctttgaaattgaatcagaccaaatggatgagtattatgaatttttaggtgaacaaggtgttgaattaattagtgagaatgaagaaacagaagatcctaatattcagcagcttgccaaagccgaagaagaatttgaccttaatgacctaagtgtaccgcctggcgttaaaatcaatgacccagttcgtatgtatttaaaggaaatcggtcgggttaaccttctttctgcaaaagaagaaatcgcctacgctcaaaagattgaagaaggtgacgaagaatctaaacgcagattggctgaagcgaacctgcggcttgttgtcagtatcgcaaaacggtatgtcggacgcggtatgctgttccttgatctgatccaggaaggaaacatgggtctgatgaaagccgttgaaaaatttgattatcgcaaaggttataaattcagtacgtatgctacgtggtggatcagacaggcgattacacgcgccattgccgatcaggcgagaacgatccggattcccgttcatatggttgaaaccattaataaattaatccgtgtgcagcgtcaattactgcaagacttaggcagagaaccaacacctgaagaaattgcggaagatatggatttaacgcctgaaaaagtacgcgaaatcttaaagattgctcaagagccggtatctctggaaacaccgatcggtgaagaggatgactcgcaccttggtgatttcattgaagaccaagaagcaacttcaccttctgaccacgccgcatacgagctattgaaagagcagctggaagatgtgcttgatacgttaactgatcgtgaagaaaatgtattgcgtcttcgattcggtcttgatgacggccgtacaagaacattagaagaggtcggcaaagtatttggagtaacgagagagcgtattcgacaaatcgaagccaaagcgttgcggaaactaagacatcctagcagaagtaaacgtttgaaagatttccttgaataagatggaacgggtcttgaagatccgttcttctttttttaaaaagatatatggataatatgcctttattttactgaaaaatgatgtcatttgcaaatgaacattgtggtgaaaaatttcaaaatctaattccatattttctattgtaagcgtatacaatacattatacaatagaataaaaaggatattagagatttaggcatgtttctattcaattttgtataaagtgtgaataaaaaacttttgtatagcaatccatttactttttgtaaaaataagttagaattagaagtgtttacatagggggaaggatcaaaaagggggaagggaaatgaaatggaacccgcttattccatttttgctgatcgctgttttaggaattggtctaactttctttttatcagtaaaaggacttgatgactctcgggagattgcaagcggaggagaaagcaaatctgctgaaaagaaagatgcaaacgcttcaccagaagaaatttacaaggcaaactgcatcgcatgccacggtgaaaattatgaaggtgtttcgggtccgagcttaaaaggtgtaggggataagaaagatgtcgctgaaattaaaacaaagatcgaaaaaggcggtaatggaatgccttccggtcttgttcctgccgataagctggatgatatggcagagtgggtgtcaaaaattaaataaaagaactatttttctctttatacattcacaggccgccgagatgttctcgacagccttttatttttgactgccgcgtgcagacccgcatcaaaagaaataatttcaaaatcatttgcttcagcttggattccgggctgattttttatatgatagtaaaggaaaaaatgattgagaaaagttgtgatgacaagtgaacgaattaaaattatctaaacgattgcaaacagtagcggagtacataccgaatggagcggtgatggccgatatcggctctgaccacgcctaccttccttgttatgcggtgctgaatcataaagccagcggggcgattgccggagaaataacagacggcccatttttgtctgcaaagcggcaggttgaaaaatcaggcttaaactcgcacatttctgtaaggcagggagacggactggaagtgattaaaaaaggtgaagctgatgccattacgattgccggaatgggcggatctttgatcgctcacattttagaagcgggcaaagacaaattaacggggaaggaacggcttattttacagccgaatattcatgctgttcatatcagggagtggctttataaagaaagatatgcgctgatagatgaggtaatccttgaagaggacggaaagtgctatgaggtgctggtggcagaagcgggagacagggatgcggcttatgacggtatttctttatcagccgggatgctcgtcggccctttcttggcaaaagaaaaaaatgctgtctttttgaaaaagtggacacaagagcttcagcacactcaaagcatttatgaacagatcagccaagcggcggatacagagcaaaacaaacaaaaattaaaggagctcgccgatcgaatggagctgttaaaggaggtaatcgatcatggctaaaagtgtaaatgggcagcagatcatccagctgtttgaacaattttccccgaaaccctatgcggttgaaggagataaaatcggcctgcaaatcggcactttaaacaaaccaattaaaaatgtgatggttacacttgatgtgttagagagcgttatcgatgaagcgattgaaaaagaggttgacttgattattgcacaccatcctcctattttccggccgctaaagcatatttcaacagatcagcctgccggaaggttaattgaaaagtgtttgaagcatgatattgctgtttatgcagctcatacaaatttagacgttgcggacggcggcgtgaatgatttgcttgctgaagcattagagctgagtgagacggaagtgctggcgcctacttatacggatcctctgaaaaagctggcagtttacgtgccgaaggaatatgaagagcaggtcagagccgcggtcggaaatgcgggggccggccatatcggtgaatacagccattgcgcgttttcatctgaaggaatcggcagctttaagccattagacggagctaagccttttatcggtgaagtgggagagcttgagcttgttcatgaagtaaggcttgagactgtatttcctaaaagcgtcgaaaaggctgttatcaacgcaatgataaaaagccatccatatgaagaagtcgcttacgatatctatcctgtcgaacagactcccgccgaaaaagggctcggccgtgtcggaacccttaaaaatgagatgacgcttaaggaattcgctttatttgtgaaagacaagcttgacgtcaatggtgtcagaatggtgggggatgctgacagcatggtgaaaaaggtagctgttcttgggggagatggaaacaagtatattcatcatgcaaaacgaaagggagccgatgtttacgtcacaggggatttatacttccatgtggcccatgatgcgatgatgcttggcctaaatgtggttgatccgggacactatgcggaaaaaatcatgaaagaaggcgtcacgagaaagctgacatcaatgtgtaatgataaaaagtttgacgtgaatatctttgtttctgaaacagatacaaatccatttacatttctataaaaaaactgaggcttttacagcctcagttttttgcttttacttttggaagtatttttttgagcggtatattatgttcagttgtccaagttgatggatcttcgtgatcaaactgctctaaaaagcgaatgacttcttttgtgatcggcgtcggtgttgaagctcccgctgtaactgcaacggtattaacgcctttcagccattcgagcttcaattcgcttaagtcgccgatccggtatgcttttgtcccggctatttcctctgacacttgagcaagcctatttgaattgttgcttttcgggtctccgacaacgattgttaagtccgctttttttgcctgctctgatacagcttcctgccgcacttgagtagcgaggcaaatctcttggtgatattcgacatgaggatatttttctttgacaagctccataatgtcgtggacatcccattgagacattgttgtttgattcgtcacgattaacttctctgcttggatatcaaggttctttacatcttcttctgtttcaactaagtgaacgatctccggcgctacgccaacggctccctcaggctctggatgcccttttttgccgatatagattacgtgatatcctttttctttcatctctaagattagattatgagttttcgtcacatccggacatgtagcatcaattgcgactaaccctttttcttctgcgattcttctgacttcgggagaaacaccgtgcgcagtgaaaatgacagttcctttgtcaacctgctttaagatgtccagacggttagagccgtccaatgtaaaaatcccttcctcttcaaacgcatcagtgacgtgtttattatgaacaatcatcccgagtatatagatgggtcttggcaagcttttatctagtgacgcatttttggcaatgaccatagcatcaacaacaccatagcaatagccgcgcggtgaaattttaattacgtccattttcggttgtcctccaatactgaagtgagtaaaggcaatataaaaagccgtaatcaaacggctctattcttgcattcttctgatctcattatagccaatctcacttcagatatcaaagaatgttaaatatataatctcggttttgaactgcctgatgttcttttcggagcaggagaggcagcttcctttttcatcggggcagatgtttttgattcttgttctttattgtcagttgttttagatttttttgggagagaagaactttttggttttgattttttgttcccatctgaggtttttgtttcagtctctttttctttttctgatgattcttctgaaacggattgtttttcactttcctcattggcctctgtttcagtatcatcacttttacttaattggctgtacagcttcatcattgctggcagatttcggactaatgggccgtactgctggatcataggggtgacttgctgcgccatgccgagtactttttgcacatttccaagcatactggataatgatgcaggattggcgatattttgaatgccttgcaggccagcacctccgctcgctgcggcacctgctcctggaactccggcgctgccagcgcctcctccgccgggtaggaatcttgacagcattccttttaagcctccgcctgcacctgcaccatttctcgctccggcatttgcctgaggaagaaattgtccggcttgctgaaaaccttgctgctgtgctccaaatgaaggtcctcgcatattaggcggtcttctgcccatcattcgctgatttggcatggggcggggcggtccgggctgtgggtaatttctcattggctgctgcggtgaaaacatacttgtacctcctttcagctctctctgctattagaatatgcatgggctgcggtatttgctttacataactgaataaaacaaacgccttgcaaacgtggtgtttttaagcaaaatcgggtataatgtgatgatggacacataatgtgccgctttaaggagctgggaaaaatgaaagaaacgaaatttgaactttatgaattgaaaccatttattatagatgcagtacatcgccttggtttttacgaaccgactgatatccagaaaaggctgattcctgcagtgttaaaaaaagaaagcgtcatcggccagtctcagacgggtactggaaagactcacgcttatttactgcctttattaaacaaaatcgatcctgctaaggatgtcgttcaggtagtcattacggctccgacaagagagctagccaaccagatttatcaggaagcgcttaaaatcacgcagggtgaggaaggcagtcagattcgctcgaaatgttttatcggaggcactgataaacaaaaatcaattgataaattgaaaatacagccgcatcttgttgtcggtacacccggacggattgctgacttaatcaaagaacaggcgttaagtgttcataaagcggaatctcttgttattgatgaagcggatctaatgctggacatgggattccttgcagatgtagattacatcggttcccgcatgcctgaggatctgcaaatgcttgtgttctcagcgaccataccggaaaagctgaaaccattcttgaagaaatacatggaaaatccgaaatatgcccatgtggagcccaaacaggtgactgctgcgaaaatcgagcatatcctcattccttcgaaacatcgtgacaaggacaagctcctttttgacatcatgtcgcatctgaatccatacctggggattgtgtttgccaacacgaaaaatacggctgaccatattgcccagtatctgactggcaaaggcatgaaaatcggcttgctgcacggcggattaacaccacgtgagcggaaaaaagtcatgaagcagatcaatgatttggaattcacatatatcattgcaactgaccttgccgcaagaggtattgatattaaaggtgtcagccatgttatcaactatgagctgccggatgatctcgatttctatgttcaccgtgtgggcagaacggctcgtgccggctcatcaggacaagcgatgaccatttatgagcttactgatgaggatgcattagtaagacttgaaaaaatgggcatcgaatttgattacttagagcttgaaaagggcgaatggaaaaaaggcgatgaccgtcagcgccgcaaaaagcgtaaaaaaacgccgaatgaagcggatgaaattgctcatcgtctcgtgaaaaagccgaagaaggttaagcctgggtataaaaagaaaatgagctatgagatggagaaaatcaagaaaaaacagagaagaaaccaatctaagaaaagaaagtaggggaacctgttgctgagaataggctcacacgtctctatgagcggaaaacatatgcttctggctgcaagccaggaagcagtctcttatggggcgaatacgtttatgatctatacaggcgcaccgcaaaatacgcgccgaaagaaaattgaagacttaaatatagaagcaggccgggcacatatgcaagaaaatggcattgacgagattatcgtacacgcgccttatattattaatattggcaacacgacaaatccgtccacttttgagctgggtgttgattttcttcgttcagaaattgaacggacagcggccatcggagcgaagcaaattgtccttcatcctggcgctcatgtaggggcaggagctgaagccggcatcaaaaaaattattgaaggcttaaatgaagtgattgatccgaatcaaaatgtccagattgcattagaaacaatggctggaaaaggatcagaatgcggcagaagctttgaggagcttgcactgattatcgaaggcgttacacacaatgagcagctgtcagtgtgctttgacacgtgccatacacatgatgccgggtataacattgtcgaagactttgacggagtgctgaatgagttcgataaaatcattggcattgaccgtatcaaagtgcttcatatcaatgacagcaaaaatgtcaaaggtgcgagaaaagaccgccatgaaaatattggctttggtgaaataggttttaacgcactgcaatatgttgttcaccatgagcagttaaaagacattccaaaaattcttgaaacaccatatgtcggtgaagataaaaagaacaaaaaaccgccataccgttttgagattgaaatgctgaaagaaaaacaatttgatgatacattgctcgaaaagattttacagcaataaaaaatgggggataacacccccattttttagcttgtaaattgtttgaatagttcattaactgtttgagctgtttctttcgatgtaatcgtctctacttgtttcaacagccgcattcgttcactctcattaaagatgtttacatttttcccgtataacaagttcgctacttcaacggcctgcgatcttgttaagctgattccgtattgttttgagtacttcagcaaatcatcagcagtagcctgattaagccgctgtaaaataattctttgaaataaaatcatcggtcaatccacctccagacttaatgtatgggcaaatcagtaaaatgtgtcagtgtttaatggtaaaatagatttataatgtatttaaaatagttattgcaggaaaggagattttatgaccccaacaaaacaacataagaaagaaacatttacccattttattttcagggtctttatgattctggtaggagctgcatctgcggctgtaagtattgaattatttttaatccccaatgattttattgatggcgggattatcggtgtatcacttattttagaccacctctttatgtcaaacccctttctgaatttcgcttttttcgttgtcatattaaacattccttttatgatcttcggatataaatatatcggtaagacctttctagtctctacgtttatagggattgtcgggcttgccgttattgaatcctcacttcaccatgtagaagccattacaacccagcctattttggctactgtgttcggaggtcttttactcggctttggcgtcgggcttgttattcgaaacggaggttcaatggatggtacagaaattctcggtattttgctgaccaaaaaactcccgttttcagtaggtgagttcgttatgttcatcaatgtgtttattttcatttgggcagtttttgtgttcggtcctgagcaagcgatgtactcattcatgacttattatattgcgatgaaaacgattgatgccgtgatccaagggcttgatgaaacaaaagctgtcattattgtgtctgagcagtatgatgagatttccgacgcgattttgcaccgtctcggtcggggcacaacgaagctgaaggggaaaggcggatatacggacgaagaaaaagacgtaatttacgcggttgtcacaaggctggaagtgacaaagctcaaatcgatcgtgtttgaagttgatcaaaatgcattcataacaattatgaatactcatgaaacgagaggcggaaaattcaaaaacgcaatccactaggctttcatttacttttattcattttatgggtataattttatctgcagtaaagaaaatggcttgctggacagacagctgccattttctttttcatacatgtgatacgttcttaagcaaagcgaaaagggggacccttcatgaacgtacaagaagcgctgaacctactaaaagaaaacggatataaatatacaaacaaacgggaggatatgctgcagctttttgctgattcagacagatatcttaccgctaaaaacgtactgtctgcactgaatgatgattatccaggcttaagctttgatacaatctacagaaatctttctttatatgaagaacttgggattttggaaacaactgagctgtccggtgaaaagctcttccgatttaagtgttcattcacccatcaccaccatcattttatttgtcttgcctgcggcaaaacaaaggaaattgaatcatgtccgatggacaagctttgtgatgatttggatggctatcaggtcagcgggcataaatttgagatttatggcacatgccctgattgtacagcggaaaaccaagaaaacactactgcgtaaaatgcgtatatatgaaaaaggggcccggtttgggctcctttttcagttattgacgcgtattaagtgatgcttgttgttgttcatccattgaacggcttctagccagttgtttactctgatgatgtttgaatcaatcggaagctgattataaggggaattgaacaaaatcaccggtatcccggcttctttcgcaatcatcatggcgttcccgtgatgatcctcaaaaaacaggtcgatgttatgattcttgaccgcttcaactttgtgatgaccgccaacgagttcgatgtggtcataatgaatgttttgtctctcaaaccattcataggtaatatcagttaaatgagtccgtctcgctgtaatataaataagcttgtgctcctctttgagaagatcaagtgactgtttcgcatgctgtgcaagcaatgcttccttatatatgatcgcttcattttgattcatccaatcccaaaattcttcctgggtaatgtttaacagctttgttaaatcataatccgtcatatcgtttaatgaaatggaaagattaaacgaacggttcaaataagggacgaatgtatcctgagccgtgattgtgccgtcaatatctattcctaagcgtaacatgcccacactccttcagtttcatcccttcaagtgtaacataaacaattgacattaacagaaaagtttagcaaacatgaatcaggcaaaatggatcaaactataaaagctcctttaataaaacagaagggggaattgaaggtggcaaacgattacgaaaagcgtgataacaacagttactatgttgatcatggatctgaagggacaaatattacccgcgacaatgacggtttttttgaggaaacagctgctgaaatcgcagagccttatcgtgctgctgaccgcagcaatgaccaagacaatgatcgcagcggcggcaatgtcaatgaaggacggggaatagggtacatcgctttagccttgtccatcatttcattgtttgtactgcctgttttattgggagctgccggtattattgtcggctatatcgcaagaagaagaggtgctcaaggccttggagcctgggcaatgggtatcggtgtcgtttcattagtgcttggaatatttattattccatttttctaacacaaaaaagcttgacgggttcccgtcaagctttttgtgtttcttcttttaattttgctttttcagcttcaagttttgcgtagtgttcctcagcaagaatgtcaatttcttttttgagttcttctaccatcgtttcctctggaaccttacggacaattttccctttccggaacagcagtccttcaccgcgtgcgccggcgattccgatatcagcttctctcgcttcaccaggtccgtttacagcgcagccgagaacagcaactttaatcggcgcttttatcttagaaatatactcttccacttcattggcaatgctgattagatcaatctcaatacggccgcaagtcggacatgagatgagcgtggcagcattggaggctaagccgaaagatttcagaagctcccttgctacttttacctcttctacagggtctgcgcttagtgaaatgcgcatggtgttcccgatgcctttgcttaaaatggcgccgagtcctgctgcgctctttactgtgccggcaaacagcgttcctgactcggtgatcccgaggtgaagcgggtagtcaaacgctttcgccgctttttcataagcctcgattgcaaggttcacgtcagaggccttcatgctgacaataatatcgtgaaaatcaagatcctcaagaattttaatgtgatgaagtgcgctttctaccattccatcggcagtcggataaccgtatttttctaaaatacgtttttccaatgaaccggcgtttactccgattctgatcggaatgcctttgtctttggccgctttaacaaccgcttcaactttttcgcgccggccgatgttgccggggttgattcggattttatctgcgccgccttcaatggctttcaacgcaagtttataatcgaaatgtatgtcaacaacgagaggaatggaaatgcgctttttaatatccgcaatggcgtttgctgcccgttcatcaggacatgctacccgaacgatttggcatccggcttcagccaaacggttaatttccgcaaccgttgcttctacatcatgtgtttttgttgttgtcatgctttggatgacaacttcattgttgccgcctattgttaaaggtcccactttgacgggacgcgtttttgtacgatgtgtgatttcactcacttgcaatcgctccttaattgtagttgccgcttctagatataacaattctagtatggtttatgtgaatttattttacaaattacattgtaacagtgtcttcgccgaactgacaagaaattaacgttaaattaagggtagaccgggaatttatacgctgttcccgcttgaatggcattggctttcacatttggattcagtgcttcaaaatcctttacaatgtcatccggagaacctgctgatccgactatcgacataaccgtatcacccggctttaccttcaccgttttataagccggttcttgtacagccgtttttgctgatgcttcatagacagggaggtcctgaatgggtatggttccaattttaaggtcataaaaaagaataaaaagtataaaaacaatgctgcatactaaggtgagacgcttcatcgcttttcctcccgcatacgaaattttataccatagtatgcttgtccatttcgattcatgacaaaagaaaagagactgcgaatgcagcctcggtttatacagcagcttttttggacggaatctcttttaaaacgagaaacaggatgacaaaattgacaaaccagttcagcaaaaattcacttggtacggttgcttctaatgcccgcatgattgtaaagaatacagttgaaagggtgatggaataagcagaaagcttccagagctgatgataggataaatgttttttctgcgaattcttaatgattaacccgataagcgctaaaaacgatacttcaataaattttcccgctgctgttacgagaaaaataagagctgagagaacagttacaatcatcgctttattttggtttaaccctgcaatgacatcttttttctgtaactctgatggcatcattgagtaagacatttcttgggcttgtccgtcaatggccaaaacaaatttgttctgaaggatgccgatcgcgttttgctttgcttcaatttgttcagtgccataggagtctgtcggatcgaacacgataacgaaaccatttgcttgagattccgtggcttttttctcatccgtttgaagtttgccgtttgaaattgtgaaatcagggaaatctttgtttaaaacagttttaaagccgttcattgattttacggtccctgtacttacataataagcggtagggattgcaaataggacagagagcaaaaatacataaagaatcgcttttccgattccttgaaatcttgtttttgcaatatcacggggagagtatgtacttttaatgaaaagctgaaacacattcactatcttcacttcctagctaaactaatatatgttgcttattgtatcgttgcatgcgtgtgaatacaaggaagacatgaagaagacagagtaaaatgggaggatggaagctatggatatgttgtattggctgttgattgcagcggtttttatcattgcctttatcgggctggtgtatcctgttattccgagcgtagtatttattgttgccggatttgtattgtacggatttttattttcattcagtccgtattcttatatgttctggcttgttgaggcagtttttgccgcagtattattcgcagcagattacgtgtcgaatctgcttggagtaaaaaggttcggaggaagcaaagctgccatatggggaagcacgatcggtttattaatcgggccttttgtcattccggttgcagggataatattggggccgtttatcggggctgtttgcgcagaacttatcgttcatcagaaggacttaaagtcagcgtttaaaattggcctcggctcactcattggttttttaacaggggttattgcaaagggcatcatacagcttttgatgatcggatactttttatggacggtcctataagaaatgctggcggcaggtttaatgggacagattatcggttaaagtgaaatatgtccgctgaaatgagccaaatcgtgagctttttcattgattacaaagcattcttttgttacattgaatgaagaaaggctcgctgtgaagcggcatttcagtacatatatactaaggaggaattatcatggcttacgaacttccagaattaccttatgcgtacgatgctttagaaccgcatatcgacaaggaaactatgactattcaccatacgaaacaccacaacacatacgtgacaaatttaaacaaagcggttgaaggaaacactgctcttgccaacaaatcagttgaagagcttgttgctgatcttgattctgttcctgaaaacatccgcactgcagtccgcaacaacggcggcggacacgcgaaccacaaattattctggacacttttatctccaaacggcggaggcgaaccgactggcgcgcttgctgaagagatcaacagtgtatttggaagctttgacaaattcaaagagcaattcgcagcagcagcagctggacgcttcggttctggctgggcatggcttgttgtgaacaacggtaaacttgaaatcacaagcacgccaaaccaagattctccgctttcagaaggcaaaacgcctatcttaggtcttgatgtttgggagcatgcttactaccttaactatcaaaaccgccgtcctgattacatttcagctttctggaatattgtaaactgggacgaagtggctcgtctatacagcgaagcaaaataatggcacaaacaaggtcctcattatgggaccttgtttttttatgtcttctttttacatatctcggtttgagtgagacagactaagggatagtaaaggggagtcagtaatgagcaaactaaaaaaagtgataggcgatgtagacgtaaacaaagggttactctttctgctgaccattggcgggctttactcgctgggaattgcactgtccaatacatttgttaatgtgtatctttggaagcagtcagggaaatttattgatttggcgatatataatttatccattgtgacaatgcagccgataaccttttatttggctggacggttagccaaaaaaatagacagggtattcattttaaggttcggcgtcatttttttagctgccttttatttaagtgtgcttttagccggagaaacggcggccagccgcctcgtgctaatcggcgcggtgctcggagttggctatggcttttattggctagcgtttaacgtactgacctttgaaataacagagccggatacacgagactttttcaacgggtttatgggcattctgtcttcctcagcaggaatgatcggcccgattgtagccggattcgtgatctcaaggcttgaaaataatacgggttatacagtgattttcagtctctccctcagtttatttgccctggctgtcgtgatgagctttttcttaaaacggagagaatcaaagggccgttttatgctgagcaaagtatttggagagcgccatagcaatatgaattggcggagaatcacgaatgcgcatttttttcagggtttgagagaagggatttttgtctttttaatcagtgtgttagtatttattgagacaaacagcgaacttgctctcggtacattcggtcttgtcaattcagctgtttccttctttgcctactactttgcatccaggctgattaagaaaaaggcgagaaaaaaatcgattttgctgggcggacttattttgtatggcgcgctgtttttgattctgttccatatgagcttttcgacattattaacgtacggcgtttttattgccatcggctatcctctgttgcttgtgccatatgtatcacttacatatgatgtgatagggcgcgcgaggcatgcaagaaaagcaagaattgaatatatcgtgcttagagaaatgttcttgaatgccggcagaattgtttccattttgtgctttctcctgattgtggcccttctgaaagaggatgtgggaattcctttgtcacttgcgatattgggtataggacatcctttgatttattactttgtcaaggatatccgttttaaggagaaggaaggggaaaatgaaaccatggaagaagacggccaaaaacgcgtaacagaaccgaccctgttaaaaggcgagagataattttttttgccaaaaaggggttatctgtagaaaaaagtcgaaaaaacctttaaaatgaaaactggcactcttacttgagtgtcttttctttctgtaaatagaaaaggtgatgttatgaggagaaataaaccaaaaaagcaaaatcataaagagaaaaagaagtcgcttccgatccggctgaatattttatttttagctgcctttgttatatttacctggattattgtggaactgggcatcaagcagatcgtgcaaggcgatgattacaaaaaccaagcgaataagcaggaacaaagtgaagtcagctcagcggtaccacgcgggaaaatttatgatcgaaactttaatgccattgtgacaaataaggctttaaatgcaatcacatacacgagatctaaatcgaccacgcaagaacagcgcttaaagatcgcaaaaaagctgtctgacatgatcaaagtcgatacaaaaaaagtaacagaacgggataaaaaagattattggattttgactagaccgaaagaagcgaaaaagctcattagctctaaagaaagacagcaggttgaagacaaaaaaatatccgatgacgatttataccagcttcagctaaaacggattactgataagcagctgaatgaattgacggataaagatatgcagatccttgctatcaaaaggcgtatggattcaggctatgctttgacccctcaatatattaaaaatgaggatgtatcagcgaaggaaatggcagtggtaagtgaacatttagacgaactgcctggagttgatgtcacgtccgattgggaacgtgaatatccatataaaaaccttcttcgctcagtgctcgggagtgtttccagttctgatgaaggattgccgtccaacttgctcgaccattatctatcgcttggctacagccgaaatgacagggtcggaaaaagctatctggaataccaatatgaaagccttctgcagggccaaaaagcaaaagtcgaaaatatcacagattcaaaaggcaatgtcacgggaacaaaaacggtatctgaaggcaaagccgggaaagatcttgtactaacaattgatattgatttgcaaaaatcagtggaaaaaattattgagaaaaaacttaaagctgctaaagcaagacctagtaccgaattgttggatcgtgcattcgttgtcatgatggaccctagaaacggcgaagtgctgacaatggcagggaagcagattaaacgagaaaatggagcctataagtttgatgattatgcattaggagccatgacttcatcctacgctatgggatcagctgtaaaaggtgcaaccgttttgaccggtcttcaaactggagcgattaatttgaatactgtatttaaggatgaaccattgtatatcggccaggataaaagagggaaaaaatcttggcaaaacttagggccggttggtattcaaactgcattagagaagtcatcaaacgtttttatgtttaaaacagctattgcagttggtaaaggtgaatataaacctcaccaagcattgcctttggatacttctgcatttgataccttcagaaattatttcagtcaatttggattaggagtaaaaacaggaattgatctaccaaatgaaatgacgggatataaaggtacaagcagattatctggtttcttgcttgatttcgccattggacagtatgatacttatacaccgctggaattggctcaatatgtctccaccatagcaaatggtggctaccgcatgaagcctcagcttgtaaaggaagtcagagattcaaatgcgaaaaaagggatcggcgcagtcgttgattctgttcagcctgaagtattgaataaagtcgatatgaagagtagctatattgaagaggtccaagccggttttagacgggttgccactaaagggacagctgcaggtcaactggcttcagcatcgtataaaccagctgcaaaaacaggaacagcccaatcattttacgacggaccggataaatcaaaaacaggaacagacacttataatacgacgcttgtggcttatgcaccagctgacaatcctgagattgctatttctgtcgtagttccttggacttacattgattacaatcaaagatactcaattacaaacgaaatcggcagggaagtaatggataaatattttgagctgaaatcgaagcaggacaaagaagatactcagcaaaagaataaagacaaaattgaagaaaatgcagaaaacacaacgtcttctgataactaaaaagaaacgctcacatgatgtgggcgttttttttttatacaaaaaaacgcactgatttacaaaaccttaacattcggttcaaaccctttttacatagaacctttactctatacgtgtaggacaaattacacattatacgcagggggaattcaggaaatgaaaaaaaacaaattggtgcttatgcttctgatggctgcatttatgatgattgcagctgcatgcggaaatgcaggagaaagtaaaaaatcgaatagcgattctgcaaaaggagaagaaaaggcatcaggttctttaaccatttctggttcatcggcaatgcagccactagtacttgcagccgcggaaaaatttatggaagaaaaccctgatgctgatatacaggtacaagctggcggttctggaacagggctttctcaagtctctgaaggagctgttcagatcgggaattcagacgtttttgcagaagaaaaagaaggcatcaatgcaaaagcgcttgtcgatcatcaagtcgctgtagttggtatggcagcagctgtaaaccctgatgctggtgtggaggatatttcaaaagatgaattgaaaaaaatcttcactggcaaaattaaaaactggaaagagctcggcggcaaagaccaaaagattacacttgtaaaccgtcctgattcttccggcacacgtgctacatttgtaaaatatgcgcttgacggagaagaacctgcagaaggcattactgaagattcctccaacacggtgaaaaaaatcattgctgatactccgggagcgattggatatcttgcattctcatatttaacagatgacaaagtaactcctctatctattgacggtgttaaacctgaagcgaaaaatgtagcaactggcgagtatccgatctgggcttatcagcattcttatacaaaaggtgaagcgacaggtttagctaaagaatttcttgattatctaaagagtgaagacattcaaaaaagcattgttactgaccaaggctacattccggttactgatatgaaagtgacacgcgatgccaacgggaagcaaagctgatcttaataaaaagaggagtgcggggacaaccgtttctcctcttaacacattcataggagtgtaaaacaatgataaacaatagagaaaatatgtctgtgagcgagcgtttaatcagctcaaggcaaaatcggcaattggatgaagttcggggaagaatgattgtgacagcatgtgcgctgattatgattgcggcatctgttgcgatcaccattttcctcggcgtgaaggggctgcaatcttttcttgtaaatggtgtaagcccaattgaattcttaacgagcttaaattggaatcctacagatactgatccgaaatacggagtgctgccatttatttttggctcatttgcagtaacgattctttctgctctaatcgctgcgccgcttggcattgcaggtgcgatttttatgacagagattgccccgaattggggaaagaaagtgttgcagccggtgattgagcttttagtcggtattccatctgttgtttatggattcataggtcttacagtattggtgccgtttatcgcccagttcaaatcgagcggaacagggcacagtttattggcgggaacgattgtcctttccgtcatgattctgccgacgatcacatcgatttctgctgatgcaatggcttctcttccgaagagtttacgagagggttcttacgcgcttggtgcgacaagatggcagacgatcagaaaagtacttgtgcctgcagcttttccaacattgatgacagctgttgtgttaggcatggctcgggcgttcggcgaagctttggctgttcagatggtcattggaaatacaagagtattgccggaaagcctgtttgacactgcgggaacgctgacaacgatcatcacgctgaatatgggccacaccacatacggaagcgttgaaaacaatacgctgtggtcaatggggcttgtgcttctggtgatgtcattcttgttcatcctgcttattcgctacttgtcatctaggaggaaagtgtaatgaaccgcaaaataacagataaactggcgaccggaatgtttggtttgtgtgcagccattatcgctgccattttagtaggtttgttttcctatattattataaacggtgtttctcagctcagttttcaatttattacaacaaaatcgagcgccattgcagctggaggaggcatacgagatcagctgtttaactccttttatattttgtttattacaatgctgattacaatcccgctcggtgtgggcggcggagtcttcatggctgaatacgcgcctaataacaaagtaactgacttcatcagaacatgtatagaggtgctttcatctcttccgtctattgtcattgggatgtttggattattgatgtttgtcaacttaacaggctggggatatacgatcataggcggagcgcttgcgttaactgtttttaaccttcctgtcatggtgcgtgtgacagaagacgcgatccgttcagtccctaaagatctgaaggaagcctctctcgctttaggtgtatcacgctggcataccgtaaaaacagttttaattccaagtgcgattccttctatcatcacaggagcaattttagcgtcaggaagggtgttcggggaagcggccgcattattatttacggcaggcctgacaacaccgcgtcttaattttacggagtggaacccgttttcggaaacatcaccgcttaatattttcaggcccgctgaaacacttgcggtccacatttggaacgtcaatacacaaggaatgattccggatgctgaagcgattgccaacggtggttctgccgtgctggtgatttctgttcttgtgtttaatctcgcggcgagatggcttggcacgatgatctacaaaaagcttacggcaaattagaacggaaagaggcgaaaaacatgtctgaacaaatggtaaaagaaaaacctgagcgagctgttattgttccgaagcagaatcacgtgcttgaggtcaaagatctgtccatttattacggaaataaacaagccgttcatcatgtaaacatggatattgaaaaaaatgcggtgactgctttaattgggccgtcgggatgcggaaaatctacttttttgagaaatattaaccgaatgaacgatttaattccatctgcaagagcggaaggtgaaatcctttatgaaggattaaatatattgggcggcaatattaacgttgtcagcttgagaagagaaatcggaatggtttttcaaaaaccaaatccatttccgaaatcgatctatgcgaatatcacacatgcattgaaatatgccggagagcggaataaagctgttttagatgaaattgtggaagaaagtttaacaaaagcggccctctgggatgaggtgaaggatcgtttacattcatccgcactctcgttatccggcggccagcagcagcgtttatgcatcgcgagaacacttgcgatgaagccggctgttcttctgcttgatgaaccagcttcagcgcttgatccgatttcaaatgcgaaaatagaggaattaattacaggattgaaaagagaatactcaattattattgtcacgcacaatatgcagcaggctctgcgggtttctgaccggacggcattctttttaaacggcgagcttgtagaatacggacagaccgaacagattttcacgagtccgaaaaagcaaaagacagaggattatattaacgggaaattcggataggagggcggcaatgagtattgctaccgaagctgtaatgaaacaggaagtctatcaagtcaatggaatgaacttatggtatggacagcatcatgctttaaaaaatatcaatttgagcatttatgaaaatgaggttacggcgattatcggtccatccggatgcgggaaatcgacctttatcaagacattgaatttaatgattcaaatgacgccaaatgtaaagcttgcaggtgagctgaactataatggcagcaatattttaaaggataaagtggacatcgtggatttacggaaaaatatcggcatggtattccaaaaagggaatccgtttccgcaatctatttttgataatgtggcttacggaccgagagtccacggcaccaaaaataagaagaagcttcaggaaattgtggaaaagtcattaaaagacgtggcgttatgggatgaggtgaaggatcgattgcatacgtccgctctttcgctgtcagggggccagcagcagcgtctttgcatcgccagagcacttgcgaccaatcctgatattttgctgatggatgaaccgacatctgcactagatccaatctcaacgagaaaaattgaagaactcattctagagctgaaaaataaatatacaattgtcattgtcacgcataacatgcagcaggcagcaagggtttctgatcaaaccgcctttttctacatgggcgagcttgttgaatgcgacaatacgaataaaatgttctctaacccgaaggaccaaagaacgctcgattacatttcaggaaagtttggatgaaaaaaacaggctgagtcagcctgtttttttatcgtgttaacgtttttacgatctttttgaaactcatgtctgattttactttaaactcgccggcacgaatttctttgtgatagccggcatcaatgacatagtcattaaagtcttgagccgaagagataatgccctctttttcaagaatagcagatacatccgcagtgctcatgccatctttaattttgagcttgtacgttttgactttgtctgttttcgtgtctgagctgctgtcatcggtcaacgatttctcttttgaatcaagaagtttttgatattcatcacggttcacagaaaccatttttttagaatcaaggtaattgttcacgtcttgttcagttactgttttattatcttttacagcagcggcctgatcttcgtcagtcagataaaaaacagctgcaagaacggctgtcgctaaaatgatgccgccagcaaatgcctgaatgccccgttttgtcatacgagcaccttctcattatctttgataatcgtattcacgtcttccactgatacatgctcagctttagcaatcgcttcagctgacataccgttattatatttagaaagtatttgtttagcgattttttgattgatgtcgctctgctttgatttgcgaatgacaaggtttgtttccagtaattcttcctcaagcactgtcattttctttttgagcttgtaaatttcctgcatcgcagaaagctgcagtgtttcgagctcctgttctacatctttcatcgggtctctttgagaatatgagaatgcaattagcgctatactgacgataaacaacgcaataatagcaatttccacgtttcatcaccttctattctttttttatccttcttttttataccataaaaccaatagtttctaaaggaattcgcgaaaaaaacgagattttgtcgagaaatctttctttgcttcttctttatgtaatggtttaataggaacacgaagtgaacgattggaaaggagaatgttaggagtccatggataaacacccatttccctataatatacgacataagctttccttttttagggacacattcgacataatcattcaaaacgctcacaccttgaccgtaagctgggaaatctcggaagaaacaatgcggctggctgaagcggtccttttcgaaaagacgcaggatatgataaaagaattgcgcattgtcatcaaaagaaaagacattgaagctgtcagtacaaaacgcacaacgtatgataaaggcgaatggacgattagacaggcggctggtgatgctgtatatcgggctgaatacagaattgtgaattcaatgaatgtctctctcaagcttgccggtacagacgacatctatcttgatgaaaatgggattcgtcatataaacagttttcagattgaggaagcgcataccaggtgggaggcgcaattttctgcatacacctgttatgggagaggggaaaaagaacggtgaacattctcctgctttcacccgaacatcccgatgagccgaaaagcgggctcggtgtccatttaaaccgcctcatttcctatttaaaacctcatatcaacattacggtttgtactccgagcgggcagctgttttcgtatgcgaagtttgaagattacatagctgatgctaactttacaatggttcgccatgtgttatcacacaataaacgctttgatctgattcatgcccatgatgacacaactgcccctgccgcccagtatttgaaacaacggcttggccttccgcttgctgcgacaatccacggtcttgaaagagaaaggaagaaggtgtgccgagaagccccacacccttacaggctcaagaccgaacggctccttatagagtccgctgatgctttgatcgtattaagcacatttatgaagcggtctcttgataaggcggcacataaaaaattaaccgttatcccgagccctgcatctatggaggaagagaaggggaaaatcccaagaagcatgaatagaagattcctcttttcatatggaaggtttgttccggaaaaaggattttcgcagctgttaaaggtgtttgccatcttgaagcagcgtcagccagacctctatctagtgctggctggggaggggccgtctctgtcctgctatgagaaattggctacggcatataacctgaaggatcgcgtcatgttcctgccgtttctcaataggaaagacatcagaacgttactgtctcactgtgaaatggctgttttccctagttcttatgaaccgtttgggcttgccgcgcaagaaagcatggaacaaggtgtgctgactgtcgtttctcagtcgggtggtttttgtgattatgccgttcatgacaaaacggcaatcatcgctgattttacgctcgtacaggaagcggctgatctgctggacagctttttaaaagaccgggagaaagcccgccggataaaagaagctggcagacaacaagtgttcaagctccaccacccccgactcattatgtcatcatatttgcagctttatgagcgtatcttcaataattcagcaattcattgaaaaacagcctagcattccgtccattatagtggtattatatataagtctgaataagtaaatgattttagtttggagggaaaataatgcgcgttaatattactttggcttgcactgaatgtggtgagcgtaactatatttctaaaaagaacaaacgcaacaatccagaccgcgttgaatttaaaaaatattgcccacgtgataaaaaatctacgttacaccgtgaaacaaaataacagctttgctgtttgaggtgtaagaaaaaagccagagctttgaaaaaggttctggctttttttctattccgaggggggatgagagatgaaatcacaattaagaaaaaagacgctggaggcactgtctgctttatcaaatgaagatctgcttcaaaaaacggaacgtatgtataagtacttgttttctctgccggagtggcaaaatgccggcaccattgcggtcaccatctccagaggattagagataccgacgcgtcctgtcattgagcaggcttgggaagaagggaaacaagtttgcatcccaaaatgccatccggacacgaagaaaatgcaatttcggacatataagaccgatgatcagctcgaaaccgtttacgccggactgctcgagccggtaattgaaaaaacaaaagaagtaaacccatcacaaattgacttggtgatcgttccaggtgtttgttttgatgttaacgggtttagggtcggctttggaggcggctattatgatcgctatttaagtgcatatgaagggaagacagtctctttgcttttggagtgccagctgtttgcgcacgtacccagtctgccgcatgacatcccggtacataagctgataacagaggatcggatcatttcttgtttttcataactttcctgtccctgattcgagaataaataaggcagaataacaaatcctattggcaggagggatataatgaaaaaacttttgatatatgccattttcgctgtttctgccgtcatgttttatcaaaatcgctaccgtcttatgaatactgtactcagccagccaggaatcaggcggtcttttatccatttgtttttaagaattccatttatccgcaataagtttatacaacaagctttctaaaatcccgtgaaaaacgggattttttgctttcagtaggcgtttcggagcgccagctgttataatgaaaaaaaactattggagcggtaaacatgtttttgctggagtatacatattggaaaattgcggcgcacctggtgaataacgggtatggcgtcatacaagccggtgagtcagatgaaatatggctggaagcgccggacaagtcctctcatgatctagttcgtctttataagcacgatcttgatttccgtcaagaaatggttagagacatcgaagagcaggccgaacgagtagaacgagtcaggcatcaattgggcagacgaaggatgaagctgctgaatgtgtttttttcaacggaagcccctgttgatgactgggaagagattgcaaaaaaaacgtttgagaagggaactgtgtcagttgagccggcgatcgttagaggaacgatgcttcgagatgatcttcaagcggtttttccatcatttcgtacagaagattgtacagaggaacacgcttcgtttgaagacgcgcaaatggcgcgagaacgcttcctttcgctagtgctgaaacaagaagaacagagaaaaactgaagcggcggtttttcaaaatggaaaaccgatttttacatatttatttattgcgcttcagatcctgatgtttttcttgctcgaaataaacggaggcagcactaatacggagacgctggtcgcttttggagcaaaggaaaacagcctgattgcagcaggagaatggtggcggcttctgacaccgattgtgcttcacatcggcatagcgcatttagcctttaatacgctggctttatggtcggttggtacagcggttgagcggatgtatggatcggggagatttttgctgatttatctggctgctggcattacgggttcgattgtgagttttgtgttcagcccgtatccttcggcaggggcatcaggagccatattcggatgcttaggcgcattactgtatgttgctttgtctaatcgaaaaatgtttttaagaaccataggaaccaatattattgtcattattatcatcaatctgggctttggttttgcggtttcgaatattgataattcaggacatatcggcggcttgattggcggctttttcgctgcagcagcactggggttgcctaaagccggagcctttggaaaaagattgttgtcagcggttttgctgattgctttggctgccggatttttatattacggattgcattcgccttcacaccaggagtcagcgctgattcagcaggcaagcgagctgtatcaggaaggaaagtatgaagaagtaacagaattgctgaacggagaagcagcgcaaaaagatgcctctgccgatcttttgaaaattcttgctgtatctgatattaaaatcggcgaatatgatcaggcggttttccatttggaacgagcagtgaaaaaagaacctaaagaccatgccgcatattactatttagccttattgtatgcggaaaaaaatgagcttgtacaagcagaaaaggccatccagacggctgtgaaactgaagccgaaggagcagcgctacaaggagctgcagcggcaaattgaaaacaataaagaatcataaaggtggaatatggaaaggaagctggcttttttgtcagcgttttcttcttgactgaccgcttccttatgaatacgcttatgatagttaagttcaagaaatggtgaggaaaatgaatacattttatgatgtgcagcagctgttaaaaacgtttggccacattgtttattttggagacagagagcttgaaattgagtttatgctggatgaattaaaggaattatacatgaaccacatgattgaaaaggagcagtgggccagagcggcagctgtccttcgaaaagaattagaacaaacaaaaaacggaagagatttttataaaggctaaggtgataaaaatggacgagatatggtttgcaggcattgacctgggaggaacgacaattaaactcgcttttattaatcaatatggcgaaattcagcataagtgggaagttccgactgataaaaccggcgacacgattactgtcacaattgcaaaaacaatcgacagcaagctggatgagctgcaaaaaccgaagcacatcatcaaatacatcggaatgggtgcacctggccctgtagatatggcggcaggagttgtttatgaaacagtaaatctagggtggaaaaattatgctttgaaaaaccatctggagacagaaaccggcatcccagctgttatagaaaatgacgcgaatattgctgcgctcggggaaatgtggaagggagcgggtgatggcgcaaaagacgtcattctcgtgacgcttggcacaggagttggcggcggcatcattgcaaatggtgaaattgtacatggcataaatggcgccggcggagaaatcggccatatttgcagcatccctgaaggcggagcgccctgcaactgcggcaaaacgggctgtatcgaaacaattgcgtcagcaaccgggattgtaagaattgcaaaagaaaaaatagcaaatgctaaaaagacgacacgtttaaaagcaaccgaacaattgtcagcgcgggatgtgtttgaagcggcgggtgaaaatgatgaaattgcccttgaggtggttgattatgtagccaagcatcttggtttggtgctcggaaatttggcaagctcgcttaatccgtccaaaatcgttcttggcggcggcgtatcgagagccggagaactgctgagatcaaaagttgagaaaacattccgcaaatgcgcgtttccgcgggcagcccaagctgctgatatttcaatcgcagcacttggaaatgatgccggcgttatcggaggcgcttggatcgctaaaaatgaatggctgaaacatcaaaattgttaaaattgtgtaaatgaaattgattttttgttgtgctcaggttaagatttaatttgatgtgttaatgagaatgttgggaatagactgatttttttgagcgtgctgcataggaggttgaaatgcgaaaaacgtttttttcgaagatttcatttatgctgattgccattttattgatgtggctgaaaacgtatgctgtttacaaaaccagttttcatattaaaatcgacaatctaacacaggaatttattctgtttatcaacccattgagttttttgttgcttatttttggcctcagcctgtttttaaaaggcaaaaacagaaatcgctacattatcgcgatgagctgtcttgtcacgtttatattgctggcaaatatggttttttaccgtttttacaatgatttcttaacaatccctgttctttttcaaacgagcaatatgggtgatctcggaagcagcatcggaacacttcttgagccgacagacctcctattagctgtagatattgcggttttaatatggcttcacatccggcaaaaagcttttcaatcggacattccctcaacgaaaaatgaacgggcggcttattttttgttcgttgcttctgtttatttcttcaacctgggcttgtctgaggcggaaaggcctcagctattgacacgctcatttgacagagaaatgcttgttaaaaacattagcctgtttaattttcatatttacgatggcgttcttcagtcaaagcaatccgcacagagagcgttggcagacagcaacagcctgacggaaattgaaaactacgtaaccgctaatgcgaaggatgccaacaaacgcttattcggcgctgcaaaaggaaggaacgtcattctcgtatccttagaatcgacgcaaagcttcgtgattaatgaaaaattgaatggagaagaaatcacgccttttctgaatgactttataaaacagagctacaactttaataatgtttaccaccaaacaggccaggggaaaacctcggattctgaatttatcgtggacaattcactgtatccgcttggacgaggtgccgtgttttttacgaatgcgggcaatcaatatatggccgctcctgaaattttgaaaaacagcggatactattcagcggtgctccacgctaataataagagcttttggaatcgtgatttaatgtacgactcatttggatatgattcgttttttgatattaactcgtatgatgtaactgacgaaaattcagtcggctggggactgaaggataaagaattttttgagcagtcttcagagctgatgaaaaatctgcctcagccgttttactcgaggctgattacactgacgaaccacttcccgtttgatcttgatgaagaggatcaattgattgatgaatatgattcaagcagccagacgctaaataaatattttccgacagtgcgttatcaggatgatgcgctgaaacggtttatcgaaaagctgaaggaagacggattatacgacaactctgttattgtattatatggtgaccattatggtatatcagaaaaccataatgaagcgatggggcagtttttaggaaaagaaataaccccatttgaagaggtacagctccaaaaagtgccgctggtcattcatattccgggtattactgataaaaagccgcaaaccattgaaacagtaggcgggcagattgatatcaggccgacgctaatgaatcttttagggattgatacgaaagatcaaattcaattcggcaacgatctgctttcagacgaaaaactggactttacggtgctccgggacgggagctttatcacagatcaggttgtttatacagacggtgcgtgttatgacaaagagacgggaaaaccgttagaagagacaaaacaatgtgaagcatttgctgataaagcaaaacaggagctatcactttctgatgaaatcatttatggggatttgttgcgattttatgaccagaaaaggctggacaattcatcaaaacggaaagaaaaacaaatgcttgatcaggcatcgtaatcacaatgtctcccgcgtcaaagtgagcgggaggctttctttttttaaatacgctgtcatatagtaacaaaaaagggggatgatgatggcgtttattacggtgaaacctgagatcaagaacaatttggccagagtggcgaaagaactgaagatagacgaggaattgcttaaaagtgcaaatcgctccgcacaaaaacatcaattgtattgccctggttatgtgatagaggagcatagcggcaaagagcttcaaaccattcaggacataaagcgctttttacagcctcggcagctgaaactttctgatagctggattgagcaagagaaaatctatgatgattcagctgttgaaaaggaaataaagaagattattgatgtttttccgtttgtctcatgccgggaaattggccgttctgtactcggcaggcctatctgggagctgaaggctggtggggagcatgccgtaaaaaaggtccatatgaacgcgtcatttcatgcgaatgagtggattacaacgtctgtcctgctaaaatggtttaaggaatactgtatgtcattatgctgcaattcgcctttctttggcttttctcccataaagctgtttaacagcacatccttatccctcgttcctcttgtcaatccggatggcgttgatcttgttttaaacggatcagaagtcatgggagccagaagagatgagctcgaaaggctaaatgaacatcgtccgaattttaatgaatggaaggcgaatataaacggggttgatttaaataaacaatttccatcattatgggaaattgaaaaataccgaaaaccggcagcacccagctaccgcgattttccgggaatctctccgcttacggagccggaatctattgcgatgtaccggctgatcacggagaatccgcctgacagactgctggctcttcatactcaaggagaagaaatttattggggctataaaggccttgagcctgaggaatctgctgccgtgataaaggattttgaggagttaagcgggaacatttataagggagtaagggatatagacagctatgctggatttcgtgattggtttattcatcattattttaaggaagggtatacggtggaacttggaaaaggccaaaatcctttgccgtttcagcagtttttacacatatataacgccacaaacggcatcttgtggagggcgttattttttcatgagtaactgaaactttttcttttttctgccgaagcaaatatgagagaataaagatgatcggaggggaatgctgatgagatcagtttgttttattctgctggcggtattgctgtttagtttatcggcatgcgaaccatctcatcagcagcaaaaacaggcatcggcggcaaaagatgagaaaaaagacatcataccgctttccgcggaaaaagcggatggggtggaaggctggctgaataacagcacaatattatatactgcgtctaatccgacgaaaacagagctttttgcgtaccgcatctttacaggcaaagcgaaaaagctctatcaaacggatggtcaaatcgttgatgttcaaatcaatgcgagggagcagatgattctgctgcaaatcacacatagccaaaagacggcagtggttttgcttaatgcagaaggagagacgctttacgaaaaagattacgaaacgtatgagcttgaagctgcttggaatcagtatgatccttatcaaatgatggtgacggaattcaatgaaaactgggatttccatacatatcaggtgaatgctaaaaaagacgaatctttcttaagcccagtacaggttccgttcattcattggacatcaaaaaatacatttgattatgtaaaagagggaagagacgataaaacagggcctttatatacgttcgatacagcttctaagacggaacagaagcttgaggataacgttctattcttcgattctttccatcaaatgagttttactgtcaaatcagcttccggaggaaaagggacgtatcagtttaaaacgccgcaatcaacatcacctgttacagcgaaatggccgctccaagcgaaatatacaagtttggctccaatggagtatgactatgatgaagcaggaggcctgttttatacattcaaacaaagcggcgatgcatataagctcgcagcagtcaatgtagcatcgggagagacaaaagatcttgtgtctctgcgggaaatggagccgattcaaatatctccgaacgggaaatatgcgttatacggctttcattttgagcaaattattttattgaaatcacatgaaacgaagcaactcatcattgatcaaaaggagatggaataacgatggctatcgcagatgtaaccattatcccaatcggtacggaaacacccagtgtcagtgcttacgtagccgatgtgcaaaagatattagaaggatatcaagcagaagggaaaatcaaatatcagctgacaccgatgaatacgctgatcgagggagaactcagtgacctttttgcagtcattcaggcaattcacgaagcgccacttcaaaaaggattgcacagagtggcaacgaatatccgtatcgatgacaggcgtgacaaaaaaacgacgcttgagagcaaaatagaaagtgtcaataaacatttacagccataaaaataaacctgtatccgatcggatacaggttttaatgtgcggttggatacccgctgtttattacggtcatcacggtaaaccatccaaagacaaataaggtggcaccggctaataaaaacccgagtatatttttatttctaacagaacgcaagactccccataaagcgaaaagagcgacaaggccgaaaatcacgacaagtaacataacacagccccctttacattgaaaaacctgcaattctttccagttttattctacctgttttttataggtttgtcgatagcgttttcattgcgattgtttgaatcttttttaaaaaaccctcataataagagcataaaaaagaaagaggtgataatagtgaaatggagacgaatgccagtagggccgattcaagctaacgcatattttctcatcaatgatgatcaatgcctgatttttgatccgggcggcgagggacataaaatcaatcaatacataaaagaaaaagggctgacgcctttagccattttgcttacacatgcccattttgaccatattggggcgcttgatgaagtgagagaaaaatgggatattcctgtttacctgcatcaaaatgaaaaaaattggcttacggatgcttctttaaacggctccggcatgctgcgagggatagaagtaacagctaagcctgcagatcatctaattgaaggcgacggtgagttgaatatcgggccgtttcatttggaaacattatttacgccgggacattcaccaggcagtgtgtcttactacgtgaaagatgcagacttggtcatctccggagatgtcttgttccaaggcggtataggacgtacggatttaataggcggcgatcaagagacgctgctgacgtccattcatgaaaaactgcttacgcttccggaacacacgctggtgttaagcggccatggacctgaaacaaacgtactgactgagcaggaccaaaatccgtttttaaatgggttttcattgtaaaaaaagagacaaaccgataaggtttgtctctttctgcatttaatggcctccgccgccgggcaccataataaaaattgagtaatatgtaaagccggcgaagaaaatcgttaaataagcgccaaaaatataaatatacatgcgttcggttaagttcaaatacgatagaaacacaaataagatcgtctgtccaaaaaataaaagggaagcatctttcatatcacctaaataaaacatgactgcaaaaattcccgtccaaaatcctaacacccggaacatgcgattcatttttatcccctcccgagagtccctctgactgttattataatggatcacacctagaaatgtaaacattttcattattaatatacaaatggaatttgtccctttgattgtgttttctattgtatgaatgtttttaaaaaaataatccgaaaaaagttctgtaaatggtttaaatgaaaaatgatccgggtagttattctacaaagagatggttaactgaggaggaaaaaacgaatggaacaacaattaactttttactcatatccaagctgcacgtcatgccgaaaaacaaaacattggcttaaagcacatcaaattgaatttaacgaacggcacttattcagagaaaccccgacaagagaagaattaaagtacattttatcgttaacgacagaaggaattgatgaaattttggcgacaagaagccagactttcaaaaatttaaatttaaacattgaagaaatgacggtaaatgaggtgctggaacttttaatcgagaagccgaagcttttgcgacgcccgattctagtagacaacaaaaagctggtgattggttataacccgggagaactgttgaagttatcgaagaagaaaacggttcatcaatctgcatgatgaaaaaccgaagatccgctgatttattcgaatcagcttgtcttcggtttttcacctgttcagaaactgggctagctggattcgaaccaacgatcacggagtcaaagtccattgccttaccgcttggctatagcccattgaatctaaacatagtatgtgtaaaggcagacgcgttatacatatatagcgtacatttttcaaaaacaggaggtagctcattaagatgatagctcttgatcagcacttaacagagcacaaagaagatatcacgcaacaatggctggaagtttgtacatcaacaggcagctggctgtattcagcgaaagatcagcaaaaactagaacaaaagttaaaagaccagcatgaattattggtgaccatcgtagcaaaatcccttagaaaagaagacgtagaggatgagctcaaccggtggtctcttcaatgcgccagagaccgtgccgttcatgaagtgacggttacacaaagtgtcggccagtttaacactttcaggcacatcatgtttgaatggattcataaattcagcgaagcttcttctcaagacatcagcattcaggaattttatgagtggagccggatcttgaatcaaaacattgatgagatcatcgaagtgtttacggaagaatatcaccaggtgaccatgatacaattaaacgcgcaaaaagaaatgattaatgaattgagtgcgccgattatgccgattactgatggaattgggattcttccgcttgtcggtgaaattgatacgcacagagcgaggacgattttggagtctgtgctggagcagtgctcagcgttaaagctctcgtatttatttttagatatttcgggcgttcctatcgttgataccatggtagcctatcaaatttttaaagtgattgacagcaccaaattgctcggcattgagacgattatttcaggaatcaggccggaaattgcccaaactgtcgtgaagctgggtctggatttttcgaatgtgaaaaccgagcaaagtcttgctaaagccctggccaataaagggtttaaaataaaagagtgttgatgcctttgccatgtttatcttgaaagatagcagctgaacagcctttcacgggctattcagcttttttaacttctataaataaaatgtgatggctgttgatgtcttttaccttaaaagagtagccatcatattctatggcactttcaggctcagcgtctatgttttgtgtcaaaaaccagccgcccaaggtgtctacttcagcctctgataaatcggttccaagcaggctgttaacatcgctgattaataattttgcatttaacaagtaatgatcctttccaagttcgcggatatgaggcacttcatccgcatcaaattcatcacggatttctcctacaatttcttcgataatatcctcgacagtgaccaaaccggacgtcccgccatattcatctatgaggatcgccatatgagtgcgttccttttgcattttcagcaatagtttataaataggaatcgtctcaatgacatggataacgggctgtacgaaaggttcaatttgatgcttcttgattaaaaaatctttgttcagcatggaaaacagcacttctttcatattaatcacgccaataacgttatctttatcctctcttacaactgggtaccgtgtatattttgtttgcttgactgtttcctgaagatttgaaatggagtcttcatctagtgacaaactgaccatttcatttcgcggcaccataatttcctttgccattcgtttatcaaaggtaaagatattattcatgtactttaattcactttttctgatctcgccgcttttatagctttcagccaataggacccgaagttcttcctctgtatatgccagctcgtgctctgatgccggcttcagtccaaacactcctgtaatcaatcgggcagagtggttcaacagccaaatgaatggaaacatgatcttataaaaccaaataagcggtttagcgaacaacaaggtaatgctttctgctttttgaatggcgaaactctttggcgccagctccccgataacgacatttaaatacgtaaccgctaaaaatgcgatgacgagtgaaagcaggtgggtaagcgattcatttaagcctgctttatgaaaaagcggtcgaagcagagtttgcacagtcggttccccaagccatcccagtcctaaggctgcgactgtgatgcccagctgacaggctgataaatattcatcaaggtgagtgatgacatgctttgccgctttagcacctttctttccttttgcgacaagctgatcaattttggaccgccgcacttttacgattgaaaattctacggcaacaaaaaatctgttaacaaaataagaatagcgactgctagtaaattgacaaattccaaaacaactgccttctccaaggaaggcatgcacctcccttttccgatgtctttctacattccataccacctgaaaatgctcataaaacatgtgttgaagcggcagactggtttagtgacgcggttattgggcaattaaagaataaagaacaaaagtttggaggagcttgacatgaaggcacatacgggaaaggattggttttggtaccaaatggggcctcaagaaagaagtaaggcaagggatctaatccatttttctcactggcctcagtgtgaaaagtggtttgaaaataaccaccacgttaattttttacgagtagatacaactgaaacggaaaatgaagcggtatttgggtcgattgtttatgatcaggggcttggtgaagaaaaagaccatactgtttttcacttttatatcaccagacaatatttttttacaatcaactttgatttttcaattttgagagagattaaaggaaaagaagttgtccggcaaatggaaagagcggacaatgcgatagaggggtttttaattcttctcggcgaactaatgaatgcgtatttaatcggtgttgatgaatttgaagtaaagctgagaaagcttagatggcagattaaagacgacaatagcaaaagcattttaaaccgcgtccatctcctgcgccatgaactgatgatttggaaaaatttgatactaagcgctaaaaaaattgaaatggcgttgaaagaaacctttttacctcaaaatgaagagaaaaaggattatcagcggactcaactgaagattgacaggggatttacatacatcagcgaatttgaaggggagcttaacaatctgctgcattcagaggaagtcattacctcacatagggggaatgaaattgtaaaagcgctgaccattttcacgacgctttttacgccgattacagctctgggggccttatgggggatgaacttttcagtgatgccggaactgaattggaaatacggatatctcttttctctcttattgattgtcacatctacagttctgatctatctctatttgaggaaaaaaggctggacgggagatatgctgcaggagcggaagaagaaaaagaaacctcgaaaaaggcggactctataggatgtttcatattttgtgcagcgtgccccgctttttcaccagacatatcagggtgaccggatacgatgtcaaggcgcttatggcagagcatcaaatccgccgtttaccgattcttgaatatggccaaattgccggtattgttgcattaggcgacctttccgttgagaaagatactggtcaaaaagcgaaaacagcataatgaaaatggaatctagcaggcatggtgaccatgtctgcttttttatttatagggaaaattataatgacaggggtacattcagttgaaagtctttttcttgccagaaagaagggatttttcagcatataacgtctcacaaaatcacgttttccctgtttgattaccgctccttctttttctacaatacgcattgaaaggagagggaatcaaattggattcaatagaaaaggtaagcaaaaacttgattgaagaagcatatctaacaaaggcttctgatattcacattgtgccgagggagcgggacgctatcattcattttcgggtcgatcatgccttgctgaaaaaaagggacatgaaaaaagaagagtgcgtaaggctgatttcacattttaaatttctttcagcaatggatataggtgaaaggcgaaagccgcaaaacggttcgcttacgttaaagctgaaagagggaaatgttcatttaagaatgtcaacgctgcccacaattaatgaagaaagcctcgtgatcagagtgatgccccaatacaatatcccttcgattgataaattgtcgctatttccgaagacaggagccacattactctcgtttttaaaacattcccatggcatgctcatttttaccgggccaactggttcagggaagactaccacactatactctctcgttcaatatgcaaaaaaacactttaatcgaaatattgtcacattagaggaccctgttgaaacaagggacgaagatgttcttcaggttcaggtgaatgaaaaagccggtgtaacttattccgcaggtctgaaagcaattttgcgccatgaccccgatatgattattttaggtgagatcagagacgcggaaacagctgaaattgcggtgcgggcagcgatgacgggacatctggtactaacgagccttcatacgagagacgcaaagggcgcaatttacagactgcttgaattcggtatcaatatgaatgaaattgaacagactgtcattgcaatagcggctcagcgcttggttgatttggcttgcccgttttgtgaaaacggatgttcatcagtgtattgtcgccagtcacgaaataccaggagagctagcgtttatgagcttctttacgggaaaaatcttcagcaatgtatccaggaggcaaaaggaaatcatgcaaattaccaatatcaaacgcttcgtcaaattatcaggaaaggaattgcgctcggctatttaacgacaaacaactatgaccggtgggtttatcatgaaaaagattagaaaagtctggtcgttaaaggatcaagccaggttattaaagaggctcggtgaaatgactgcgggcggatatacgcttctggatggattacgcctgatggaacttcagatgaataagaggcaggcggctgacttgactggttcggtcacttgtttgagggaaggggctccgttttatcaagtactaaagagtttgtcatttcataaggaagccgtaggtatttgttattttgctgaaacacatggtgaactgcctgcttccatgatccagagcggagagctgctggaacgaaaaattgcacaggcagaccagctgaaaagagtgctgcgctatccgcttttcctcatctttacggtcgctgtcatgttttatatgttacagtccatcatcattcctcagttttccggtatctatcaatcgatgaatatggaaacctcacgttcaaccgatatgctttttgctttttttcagcatattgatcttgtgatcattttgcttgttctttttacagcaggtatcgggatttattattggcttgtgtttaagaaaaaatcacctgcccggcaaatgctgatttgtatcaggattcctttggttggaaagcttgtaaagctgtttaacagctactttttttctttgcagctaagcagccttttaaaatcaggcctctcaatttatgacagccttaatgcatttaaacatcaaacgtttctccctttctaccgctgcgaggctgaacaattgattgaacggctaaaagccggtgagtcaattgaatccgctatttgtggaagccctttttatgaaactgatttatcaaaagtcatatctcacggccagctgagcggccgattggatcgggagcttttcacatacagccaattcatattacagcgcctggaacacaaagcgcaaaaatggacaggcatccttcagccaatgatttatggatttgttgcagcgatgatcttacttgtgtatttatctatgcttgtgcctatgtatcagatgatgaatcaaatgtgaaaggaagaggctgatgaatgagaaaggatttacacttgttgaaatgttaatcgtgctctttattatttcgatcttgcttttaattacgataccgaacgtcacgaaacataatcaaaccattcaaaaaaagggctgtgaaggcctacaaaacatggttaaggcacaaatgactgcctttgagcttgatcatgaaggacaaactccgagccttgccgatttacagtcagagggctatgtgaaaaaggatgctgtctgtccaaatggtaagcgcattatcatcaccggcggagaagttaaggttgaacattaaattaaacgaggagaaggggtttacccttttagaaagtttgcttgtgttaagccttgcctctatcctcctgattgccgtcttcaccacacttcctcctgcttatgacaatacagctgtccgacaggcagcaaggcagctgaaaaatgatattatgctcacacagcagactgctatttcccgtcaacaaagaacaaaaattctctttcataaaaaagaatatcaattagtcattggtgatacggtcattgaacgtccgtatgcaacgggactttctatagaactgctgacattaaaagaccgtttggaatttaatgagaaagggcacccgaatgcaggcggaaaaatacgagtaaaagggcatgccgtttatgacataacagtttatctagggagcgggagagtcaatgtggagagaaaataaaggtttttctacaatagaaacaatgtctgcgctaagcctgtggctgtttgtgctgctgacagtcgtccccttgtgggacaagctgatggctgatgaaaaaatggcggaatcacgagaaatcggctatcagatgatgaatgagagcattagcaaatatgtcatgagtggtgaaggagccgcgtcaaaaacgattacaaagaacaatcatatctacgcaatgaagtgggaggaggagggcgaatatcaaaacgtatgtatcaaagccacagcttataaagaacaatcattttgcctcagcatcctgcagacagaatggctacacgcttcttaacgtattattttcgctctcagtctttttgctcatatcaggatcgttagctgcgattttccatctgtttttgtctcgacagcaggaacatgacggtttcacacagcaagaatggatgatttcgatagaacagatgatgaatgaatgcaaggagtcacaggcagttaagacagccgagcatgggagcgtgttaatctgcaccaatctttccggacaagacatccgttttgacatttatcaatcaatgataagaaaaagagtggatggtaaagggcatgttccgattttagatcatattactgccatgaaagctgatattgaaaatggtgttgttttgctgaaaattgagagtgaggaccaaaaagtgtatcaaactgcttttccagtctattcgtatttaggaggggggtgaatgtatcgtacaagagggtttatttatccagctgttctttttgtgtcagcgcttgtgctgttaatcgtgaactttgctgctgctcaatatatttcacgctgcatgtttgaaaaggaaacaaaagagttatacataggagagaatttgcttcaaaatggggtgcttctttcgattcggcatgttctagaggaacggaaaggccaggagggtacgcagcaatttccatatggacgggtttcttattacattcatgatacatcgataaaagaacaaaaagaaatcaacttaagagtgtcaacggagtcgggaacagaaagaactgcacagatcgtatttgatcaaaaacagaaaaaactgctgagatggacagaataaaacagtgtaaagggtataaaaaaagtcatgtgagacaacacttcataataattgaatgatgaggtgatcacgtgaaaacgaatgattatgttaaatatatgacgcagcaatttgtcaaatatatagatactccgagagatgagcgaaaagaacgaaaagaggtgcggaaagaaacaaaaacgcctgtttcccagcagttgttcggtattttaccctatggcttcagactttggctgaaacggaaaaaataaccgcaaataaacgaataaggtccttcaaaaaatgtaggaccttattgatattcttctaatatggcgattttattgaccttttggctataaggatcaaatgaaatcgtcacaaaaacgccgaattcttttgacccttccctcagagttaaatggtattgcttcactgcttcatcttttcttttacggtcccatactttttgtttgaacagtacctgtgcaagcgggtaccttttttttgcttcttttacagcaatctcttcccatttggacatgtggcgggcggttacaagcggtgtttcttctgcgtgagcggctgtggtgccaaagacgagaagagatagacaaatcacacattgtttgatcatcatgctgtcaccctttctttgtttattattaccaaataataatgggatatgcatttaaattctcacataacaatcccaaaaatttcaaaaaaattgaaaaaatgagcaatactgagcaagactttgtaatatgatgaaaacattcttttaaacgaacgaaatgagcgatttcggtgtttttaaatctataaatcgttgattatactctatttgtgaagttctttaaagagaacggttgtcatatcaagttacagtgttttacaggaggtaagatatgtttcgattgttttacaatcagcaaaaggcgaagacgaaactgaaagttctgcttatctttcagctttcagtcattttcagtctgactgccgcaatatgcttacaattttccgatgatacaagcgctgcttttcatgatattgaaacatttgatgtctcacttcaaacgtgtaaagactttcagcatacagataaaaactgccattatgataaacgctgggatcaaagtgatttgcacatatcagatcaaacggatacgaaaggcactgtatgctcacctttcgccttatttgctgtgctcgaaaatacaggtgagaaacttaagaaatcaaagtggaagtgggagcttcataagcttgaaaatgcccgcaaaccgttaaaggatgggaacgtgatcgaaaaaggatttgtctccaatcaaatcggcgattcactttataaaattgagaccaagaaaaaaatgaaacccggcatttatgcatttaaagtatataaaccggcaggctacccggcaaacggcagtacatttgagtggtcggagcctatgacgcttgcaaaatgcgatgaaaaaccgactgtccctaaaaaagaaacaaagtcggacgtcaaaaaggagaatgaaacaacacaaaaggatatacaggaaaaaacaatgaaagaagaaacatctcaagaagctgtaaccaaagaaaatgaaactcaatcagaccagaaggaaagcggggaagaggatgaaaaaagcaatgaagctgatcagtaatattttatacgtgatcatctttactcttattattgtgctgacacttgtcgtgatttcaacacgttcatccgggggagagccggctgtgtttgggtatacattgaaatcagttctgtcaggttcgatggagccggagttcaatacaggttccttaatattggtcaaagaaatcgctgatgtgaaagagcttcaaaaaggtgacgttattacatttatgcaggatgcaaatacggcggtcacccacagaattgttgacataacaaagcaaggagaccatttgttatttaaaacaaaaggtgataataatgcagcagctgattcagcgcctgtatcggacgaaaatgttcgcgcgcaatacacaggttttcagcttccatatgcaggctatatgcttcattttgccagccagccgattggaacggctgtattattgattgttcccggcgtgatgctgttagtgtacgcttttgtgacgatcagcagcgccattagagaaattgaaagaaagacaaaagccttggaaacagatacaaaggacagcaccatgtctacttaacttcagttgtaaacctggcaacaggtttcgatataaaatcattcaataaaaggggagtttaccatgggtatgaaaaagaaattgagtttaggagttgcttctgcagcactaggattagctttagttggaggaggaacatgggcagcatttaacgacattaaatcaaaggatgctacttttgcatcaggtacgcttgatttatctgctaaagagaattcagcgagtgtgaacttatcaaatctaaagccgggagataagttgacaaaggatttccaatttgaaaataacggatcacttgcgatcaaagaagttttaatggcgcttaattatggagattttaaagcaaacggcggcagcaatacatctccagaagatttcctcagccagtttgaagtgacattgttgacagttggaaaagagggcggcaatggttacccgaaaaacattattttagatgatgcgaaccttaaagacttgtatttgatgtctgctaaaaatgatgcagcggctactgaaaaaatcaaaaaacaaatagaccctaaattcttacatgcaagcggtaaagtcaatgtagcaacaattgacggtaaaaccgctcctgaatatgatggtgttccaaaaacaccaactgacttcgatcaggttcaaatggaaatccaattcaaagatgataaaacaaaagatgaaaacgggcttatggttcaaaataaatatcaaggcaactccattaagcttcaattctcgttcgaagctacacagtggaacggcttgacaatcaaaaaggaccatactgataaagacggttatgtgaaagaaaatgaaaaagcgcacagcgaggataaaaattaataacagccataaaaagagacggcccagtattcatatactgggccgtctcgatggttattgacaaaagaggagttagtgcctctgctcaggcactactcctctttttgggattttctccatttttgataatctaaaaattcacgaaattgttttttcgataccccggatgtcatcgcatcgcgaaccaatttttcccattcactatctaattgaccatcgtattcggtttcatgtttctcatcgagcaaagtatgaaccgagacgtccagaacagcggagactttttcgagaaattgaatggaggggttcgtttgtagatttcgttctattgagcttaaataagacttcgctaccccagctttttcagctagttctgatagtgagtagcctttttctttacggtattgtttaatacgctggccaatcaatgtcatcaccttccttgtgatattatagcacattcagaaaggatttacggtatgacttctggctgccggaccaggatgagcagactttttgtttaaaagtaaatattttcgtatttcttccgggctgatatttgcctctttggcttccaccattaattcaacccattcttgatccaattcaaagtgctcttgttttgcattcttcatgcagtttctcctcctaaaatacttgtttatgtatttcagccagtccggccatgacttattgtatgcttcattagtctctggaagtcatttgccattaaatcaccagaatttttttccaatatacctttattataatcgtattttctcaaaaaaaacgagaatgatgtcgaatggtaaaaaagttagcttgaaatattattttgcagataaaacaatccgccattttcaatttcaactgatatctttggttgatacaaggttttcagcgcctgtttttctagatggtattcttctggtttttcttctatatgctcgtaaaacttatcaagcaatgtcatatcattcttccacctgttaaccgcctgttccgcccagtcggacggctcctgcatagcggatttggaaatatagttttccatacgcttaagtccgctttctggtttgatcataggtgaaatggtgaagcaatagtcacatatttgtgatgtcagtgaaagctgagtcagcttgctttgaaaatcttcaattatcgttccagagactaggtgaagacctagtgataataacttatcctttttcatgtcggactggtatgaaatcgtgacatttataccaagccaaggctgaagtgggactttggctccggctgattcaattttctcatacattctggtaaatctcccattttgtttaacagctttaaatatttgaaaaagacgcggggccccaaaatatataaattcaccatctaggtcttttggcgcattttctttatctgtaataaaagtgattttcattggattcggatcaccgcctgtcttctcgcgccaatgccagtagaaagggcggttcatgatttgtttgtccatttcaactgtaagctgcactgtcatatagcctaagccttgatcgacgatttggcagctgtttgcttgaaaaaaacgcagcagaaaatcgtgaacctcttgctgtctcactagtaaaacctccttacaggctaagatcctcttttttcagcaggctgctgttttttataagacaaaaatgaggttaagttatccatttttattttcatttcttcttctgttgctgagtgatacaaaatgtcatgaaggtgctcttcaaaattgttcacttgaattttcgttaaaatatcatcaagttcgccgaccactttttcaaacaaatgaattttttcatataaaagctttagaatatgctcttccaccgtatgttttgttgccatgttataaatgtgcacgtcacgctcctgcccgagtctgtgaattcttccgattctttgctcaagtcgcatcggattccatggcaggtcatagttgatcatgtgattgcaaaattgcaggttaattccctcaccgcctgcttcagttgcaataaggacttggatttttccgcggaaaagatccttcatccagtcttttttcccacgtttaaatccgcctctaaacggcacagaactgatgccgttttgctgaagaaaccactgcagataaatctgagttgcacggtattctgtaaaaatgatgaccttatcgtcgatctttttgatcaaatcaacaacttgaagcgctttagagttttgtgtcacttgattaattcgatctattaaaactgaaatcgtatcctcatcaatggcaggtgcttgtttctctttttgatcaagcatctttttcagcgtcatatacaccgcttctctgctcgaacagcattctctttgcaaggtcataatcgagaacatgctggctggtttattgatactttccttcaaacgagaaatttcatcataaagcgcctgctctgatggagaaaattcaatcggcactgtttcaacatggcgctgtttccaattcagcccggtatcatgccgcctgttacggatcatgactttattcacaagatcttttaaatgttcatgcgcttctaaactggatttcttcttggcgaactcctcctgaaagtgattctgactgcctaaatggccgggttttaataaggacaccaaattgaaaatctcttcgatacggttctggattggcgtcgcggtaagaagcaggcaatatttttttacgagattccggacaaattcatagttcttcgttttgctatttttcagtttgtgtgcctcatcaataatgacaagatcatatgggattgacagaacgatttcgcgatggggcgagcgcttcgcggtgtctattgatgagacgacaatatcgcattgctcccacacatagcttttcttttgttcaacagccggaatcaaaaatttttcctgaagctctttgacccattgtgacacaagggaagcgggcacaaggatcaaaattttttttgctaacccgcgaatcatatattcttttagaatcagtccagcttcaaccgttttcccgagaccaacctcatctgctaaaatcgctttcccgttcattttttcaaccactttttgcgccacctcaagctggtgggggagcggcgtaaaggaaggcagatataaaggagcccgtaaaccttcaaactctggaattgctaatgttttctggatttctgcggagagcttgtacagttcccagtttgcccaagggccatcgtttttcagtctttcagcaaattcttcaggccattttgcatcgtagatcatttctgtattcattgctttgaaaccgcctttcttattcttcgattcttaagatgaataatattagaaaaatctgcccaaattgctgttgcccagcatatagtgatgatggtaggatatgagtatgtatttgatgtaagatattgctatagtatgtccataacagcatgaaaatatgagcgaatgacagcaaggggagagacctgaccgaaaacctcgggatacaggcgccgaaggagcaaactgcggagtgaatctctcaggcaaaagaactcttgctcgacgcaactctggagagtgtttgtgcggatgcgcaaaccaccaaaggggacgtctttgcgtatgcaaagtaaactttcaggtgccaggacagagaaccttcattttacatgaggtgtttctctgtccttttttgtatgttttttagctgcgccgttgataaaggggaggaattagatgctgaaaagaacgccgttatttgacctgtataaggaatatggaggaaaaacgattgatttcggaggttgggagcttcctgttcaattttcttctataaaaaaagaacacgaggctgtccgaactgcagccggtttgtttgatgtatctcatatgggagaagtcgaagtgtcagggaacgacagtctgtcttttttgcaaagattgatgacaaatgatgtttccgcgttaacgccaggccgtgctcaatatacagcgatgtgttacccggatggcggaaccgtcgatgatttgcttatctatcaaaaaggagagaaccgctatctgcttgtcattaatgcttctaatatagataaagacttggcttggatgaaagaacatgcagcaggtgatgtgcagattgacaatcagtcagatcaaatcgcgctcttggctgtacagggaccgaaagcagaagcggtcgtaaaaaatctgacagatgcagatgtgtctgcattaaagccgtttgcgtttattgatgaagccgatatcagcggccgcaaagcacttatttcacgcactggctatacgggagaagacgggtatgaaatttactgccgcagtgatgatgctatgcatatttggaaaaaaatcatcgatgcaggggatgcatacggattgattccatgcggtctcggtgcacgtgatacactccggtttgaagcgaagctcccgctctacggtcaggagctgacccgagatattacaccgattgaagctggtataggctttgctgtaaagcacaaaaaagagtctgactttttcggtaagtcagtattgagtgaacaaaaagaaaacggagcgaagcgcaaacttgtcggtctcgaaatgattgaaaaagggataccgcggcacggatatgaggttttccaaaatggcaagtctgtcggaaaggtgacaaccggcacgcagtcaccgacattagggaaaaacgtcggccttgccttaattgattcggaaacaagtgagatcgggactgttgtagatgtagagattcgcaaaaaattagtgaaagcaaaggttgtcaaaacaccattttataaacgctaatattttttcttggagagaggagacaacacatgaagcaccgttatttgcccgcaacagaaaaggataaacaggagatgcttgctactatcggcgtaagcagcatcgatgatttatttgctgatataccggaaaacgtcaaatataaaaaagagtatcaaatcaaaaaagcgaaatcagaaacagaattaacaagagaactgacaatgctggcctctaaaaatcgtgataccgtacaatacgcttctttcttaggagcgggtgtatatgaccactatcagcctgtcattgtggatcatgtcatttcgcgctctgagttttataccgcatatacgccttatcagccagagatttcacaaggagagctccaggctatttttgaattccaaacgatgatctgtgaactgacaggcatggatatcgccaactcctcgatgtatgacggcggaacagccttggcggaagcagcaatgcttgcttcaggccacacgaaaaagaaaaaaatcgttgtgtcaaaaaccgtgcatcctgaatcgcgagaagtgctgaaaacgtacgcaaaaggtcagtatattgatgttgttgaagtacccgctgcggatggcgttacggatcttgatgcattgcgccaaaccgtttgcgagaacacagccgcagtgatcgttcagtacccgaattttttcggccggatcgagccgttaaaggatattgagcctatcgctcaccaagggaaatccatgtttattgtttcagctaacccgcttgcgctaggtcttctcactccgccgggcaagtttcagtctgatatcgtcgtcggtgatgcgcagcctttcggcattccttcagcatacggcggcccgcattgcggcttttttgccgttactaaaaaattaatgagaaaggtgccgggccgtctcgtcggacaaacggaagacgaaaacggaaaaagaggctttgtgcttaccctgcaagccagggagcagcatatccgccgagataaagcaacatcaaatatatgctcgaaccaagctttaaatgcgctggcagcatcagtggccatgactgctctcggaaaaaacggcgtaaaagatatagcccgccaaaatctcttaaaagccaactatgcaaagcaagaagcaaaaaaagcaggtcttactgttatgtttgacgggccgatatttaatgaatttgtcatcaaactggatgagccggtgagagctgtgaacaagcgtttgctggcaaaaggcatgattggcggatatgatcttgggttgacgtatccggagctggactgccatatgctgattgctgtaacggagctgagaacaaaagaagaaattgacgcactcattcaggaattgggggatcgccatgagtaatcaggaccaggcacttatttttgaactttcaagagaaggccgaatcggctatagtctgccggagctcgatgtaccggaaatcgaattgggggacctcttgtcagacacctatattcgtgacgaagacgcagcgctgccggaggtttcagagctggacatcatgcgccattatacagcgctgtccaaacgcaatcacggggtggattccggtttttatcctctcggttcttgcacgatgaaatataatccgaaaatcaatgaaaaaatcgcacgtattcctggttttgctgcgattcatcctcttcaggatgaagacacggtgcaaggcgcattagagcttttatatgatttaagcaagcaccttgaagaaataacgggaatggatgaggttacgcttcagcctgctgccggagcgcacggcgaatggacggggctgatgatgatccgtgcctatcatgaagctcgcggggatttcaagcggacgaaggtcattgtccctgattccgcgcacgggacgaatcctgcatcagcgacagtagcaggctttgaaactgttacggtgaaatcgaatgaaaatgggcttgttgatttagaggatttaaaaagagcagtgaatgaagaaactgcagctctcatgctgacgaatccgaacacgctcggcttgtttgaggagcagattacagagatggcggaaattgtacaccaagcgggggggaaactgtattatgacggcgctaatttaaatgccgttttaagtaaagcgagacctggtgatatgggatttgacgtggtgcacctcaacctgcataaaacattcacaggccctcatggcggtggaggccccggctcaggccctgtcggcgtaaaaaaagatctgattccttatttgccaaagccagttttagttaaaaaagaagggcgctttacgtttgattatgaccgccctcatgcgatcggccgtgtgaagccgtattacggcaactttggcattaatgtgagagcgtatacgtatattcgctccatggggcctgacggattaaaggctgttactgagaacgcagtgttaaacgccaattatatgatgagaaagctcgcgccttattacgatcttccgtttgaccgccattgcaagcatgaatttgtattatcagggaagcggcagaaaaagctgggagtgcgtacgcttgatattgcaaaacggctccttgatttcggctatcatccgccgactatttatttcccgcttaatgttgaagaatgcatcatgatcgagccgacggagaccgaatcaaaggaaacactggacgcgtttattgatgctatgattcaaatcgcaaaagaagcggaggagaatccggagcttgttcaggaggccccgcatacaacgattgtaaaaagaatggatgaaacaaaagcggcgagacacccggtgctcagatacgaggcggtagaaagataaataaaaacagctgtctaccagacagctgtttgctttatttcttcgctttaatctttccgccccattttttaaagccgccttttaggttgtaaatctcagtgcagccgtttttgcgcagggtttgtgccgcgcgtccgctgcggacactgttttggcagtacaggtaaacaggcttgtccgtacggatctcattttttctctgtttcagctgggaaagcgggatgttgcgggcgcctaaaatatgtccgccctcaaactcatttggctcacgaacatcaataagctgtgctttgcggtaacccgcgcggaattcttcttcggtaagtgttttcataattcgctgctgatagacatatgaagcaatcatatagatgataaacgcagcaaaaataatcaaaacgatcatattagacaatgtgattctactcctttagcatataaaatcaaaaccctgcttcataaaacaaggtcatagagccgttttcgacaaatactattatagtaaagcacagcgtgattgtcatctataatggaactaaaatatttttcattttcccgacagtttgataaactgattctattaaaacggtaaggaaggtcttaaaatgcaaaaagaaacttggcggtttatagactcaggcaatgcaagtcctgcattcaatatggcgcttgatgaagcgcttttatattggcacagcgaaaagaaaatccccccggttatccgtttttacggctggaatccggcgacactttctgtagggtattttcaaaatattaaaaaggaaatcaattttgaagcagtacataaatataatctaggattcgtcagacgcccgaccggcgggagaggtgtgctgcacgatcaggaactgacatacagcgtaattgtttcggaagagcaccccgagatgccggcgactgttactgaggcttaccgggttatttcagaaggcatacttcaaggctttagaaatctcggtctggatgcttactttgccatcccgagaactgaaaaagaaaaagaaagcttaaaaaatccgcggtcatctgtttgttttgacgcgccttcgtggtatgagctagtggttgaggggcgcaaggtggcgggaagcgcgcaaacgagacaaaaaggcgtgattcttcagcatggctccattcttcttgatttggatgaggacaagctgttcgatctgttcttatatccaagtgaaagagtaagagagcggatgcagcgcaatttcaaaaataaagcggttgccattaatgaactcaccgaaaagcgggtgacgatggatgaggctcgtaaagcctttaaagaaggatttgaaacaggtcttaacattcatttggagccatatgaactttctcaggaagagcttgattttgttcatcacttggctgaaacaaagtacgcttcagatgaatggaattataagcggtaaacagggcttttgacccgcggagcatccttgttttttcaagttcattagtgtaaacttgtaatggtttataaagttaaggtgctttttgggagggtttcgatgacaacaccaagtatggaagattatattgaacagatttatatgctgattgaagaaaaaggatatgcacgagtttccgatatcgcggaagcattggcagtccatccctcctctgtaacaaaaatggttcaaaaactagataaagacgaatatttaatttatgaaaaatatcgcggtctcgtgttaacgtctaaagggaaaaaaataggcaaacggctggtatacagacatgaattgcttgagcagtttttaagaatcattggtgttgatgaagagaaaatatataacgatgtcgaaggaatcgaacatcatttaagctggaacagtattgatcgcatcggggatcttgttcaatattttgaagaagatgatgcccgtaaaaaagatctgaaatcaatccaaaagaaaacagaacatcataatcagtaaaaaggcggtctcgaaggaggccgtcttttttgatacgctgacgccacccgtcattcgttggtctatttctgcgcgtgttttcttaaaatggtaataaacgatcggatggagggggagggaatgagatgtatattgacggtgtgttttccggcggaggagtaaaaggcattgcgcttgcaggcgcttatgaagcgcttgaggaaaaaggcttccgctttaaaagggttgcgggtacaagcgcgggcgccattattgccgctttcattgcgtcaggttacaccagtaaggaaatccacgctttaattgaagaagtggacggagagaaattgctggatcaaaggtactcttttctccccttaaaaatgctccagtgggtgtccatctactggcgtcttggcttatacaaaggcgatacgatagaaaaatggattgctgatctgttaagagcgaaaggcataagggttttcggcgatttacagaaagggtctctgcgccttattgcttctgatctgacaaacggcaccatgattgttttgccggacgatttggcccgttacgggttaaatcccgatatgttcccggttgccagagcggtcagaatgagctgcagcattccgtatttttttgaaccgataaaattaaaaacggacacaggcaccgccacggttgtcgacggaggtgtgttaagcaatttccccatctggctgttttcaaaggaaagaaagcgccctgtgatcggtgtgacgcttgcgccgcgtgaaagagagcgtccgaaaaaaaatatccgcaacgcttttgaactgttcggcgccctgtttgaaacgatgaaggatgcccatgacgcaaggcacattgcatcacgctatgaacaaaatatcatttttctcccggttgatggcgtaatggcaactgattttcatttaacacaacaaaaaaaactagccctgattgagctaggtaaaagacggacagagctgtttttaaagcagtggacctattaaaaaagcgccctgtttttctttttattttttttcccttctataacagtcagctgagtctggctttttttcttgagaatcatcggcttaggcttgctggcgctcggaacgcttcgcaggtggctgacacgtcccttatgtccggcgcggtgttttgctttttgttctttcatccggcgccgcgattgtttcgccgcttttttgaaggctgctccttcgctgcccgcatttcgattcattacatatttcacaataaaataaataatgatacctgccacgatgacggttaccgccatttttgccatttctccgggattggttaccagcacatagaggaaaccgaacgctcccagcgcaattaatacagcaataataggttgtacacgatgattcataactgtccacctccgaaagtaatagcagggcaacggattttagatgacgttgtgagaaggcttctgattttgctcagacaatgcttcgagtctgagaagttcgttaaagctttcgatggcaacttcaacctgttcatccttaggttcctttgtggttaacagctgaagccacagtcccgggtacccaagtaatttcagaccgggaatgtcacgcactttgttggtcagctgcagaacttcaaaggatataccaagcacgaccggtatcagtgcgacacgatctataacacgcagccaaagcggatctgtcggaacgagtaaataaacaaacatgccgacaataatcgtaaataaaataaagcttgatccgcagcggtaatgaagccgagattggttttggacgttctccacagtaattggcaaattctgttcataacagtttatgactttatgttcggctccatgatattgaaacactcttttaataagcggtgtcatggacaaaaaatagatgtaaccgagcagcaaaatcaacttaaacaggctttcaaccgcgatttgcgccgtgtccgaggaaaaaatcggccttgtcagttcagctaagaaaactggaaccaatgtaaatacgaatttactgaacaaaaatgataggacgcctataactgcgaggctgagatacatagacagcccggaggattttttttcttcctgctcaagtgtctcgtcttcagatggatcgagcccgtaacgttcgcttgaaaaattcaaatgctttgtgccgtttgcactcgcttcgataatggccgcgatcccccgtaaaaacgggatctttttcacgatgttcagtttcgggttgtgtttgcgtggaagcttaaaaaagtcaatgcttccatccgttcttctgatggctgtaacgtaatgatgctttccgccaaacataacgccttccacaacagcctgcccgccgtaagcgggcggaactttatgttttgacatattatcaacctgcctatttctttaggattgctaaccatttcctttcactctattgtacaggaaacagcgctaaacctctagattgacaggctgaaaaaattgccatagccttgctttttctacatgcattatacccgttattttcaaattttactcgcagctgtcaaaaagtgtgagcttttttattgacatttctttttttgggcacactttaactggaggtgccatgatgacaagcgaaaaagatacagaacaaaatgaagaattgaatgagaagcaaaagccgcctgtttcaatggccggcagggtggcggcaacaggtttttgcggaggcgtactttggagtttcgttgcttatatcgcatatttgtttcatttttccgaaattagcccgaatatgatattgcagccgtttgtgctcggagagtggaaaaaacatgggctgggaacggtaatcagcatcattttgattggagtaatttcaattggcgcagcgtttctttattttcttctattgaaacgtttaaaaacaatgtggccgggtattttatacggcttggtgctttggctgctcgtgttttttgtttttaatccgatttttccagatgtgcgcacggtgaccgaactgacatcagatacaattattacgaccatttgcatttatttgctttacgggctgtttgtcgggtattctatttcatttgaatacaatgagctgaattcggaaaagcttgcacgtgcgctgggaatgcatagagaatagtgtataatccttttccagtatgataaaatgttcacgagaagtgaacattttttacatgagaaaccctcgcgaaaaggagagattatgtgcctcattttttgattttgaacggaccgaatgttaaccggcttgggagtcgtgagcctgaagtattcggccgccagacactgaccgatattgaaacagatctttttcagtttgctgaagccttacatatccagctcactttcttccagtctaatcacgaaggtgatttgatagatgcgatacatgaggctgaggagcaatacagcgggattgttctgaaccccggcgccctgagtcattacagctatgcgatcagggatgctgtttcaagcatcagtcttcctgtggtagaggtgcatttatcaaacttatacgccagggaagaattcaggcatcagtcggttatcgctcctgttgcgaaagggcagattgtcggtcttggagctgaaggctacaagcttgctgttcgctacttattaagccagcaagggggagaatcaagatgaagctagagaaattaagaaacctgtttggacagctgggaattgacggcatgctgattacaagcagcacgaatgtacgctatatgacagggtttacaggttcggcgggtttggctgttatatcgggtgacaaagcagcgtttattacggattttcgttatactgagcaggcgaaggttcaggtaaagggttttgagatcattgaacatggcggcagcttgattcagaccactgccgacactgttgaatcgtttggcatcaagcgtctcggttttgaacagaacagcatgacatatggcacttacgcttcatacagcgccgttatcagtgatgccgaattagtgcctgtggctgaatccgtggaaaagttgcgcttgattaagtctagtgaagagattaagatattagaggaagctgcgaagattgcagatgatgccttcagacatatcttgacgtttatgaaacccggcatttctgaaatcgctgttgccaatgagctggagttttatatgagaagccaaggagcagacagctcttcttttgatatgattgtcgcctcaggccttcgttcgagccttccgcacggtgtggccagtgacaaactgattgaaagcggagaccttgttacgcttgattttggcgcttattataaaggatattgttctgatattacccggacggtcgctgtaggtcagcccagtgatcaattgaaggagatctatcaggtagtatttgatgctcaggcgcttggcgtcgcacatattaagccgggaatgacaggaaaagaggctgacgccctcacaagggatcatattgctgcaaaaggctacggtgactatttcggccattcaaccgggcacgggctcggcatggaagttcatgaatcgccgggattatccgtcagatcttcagctatccttgaaccgggtatggtggtcacagtggagccgggcatttacataccagaaacaggcggtgtccgcattgaagatgacatcgtgattacagaaaacggcaaccggacaatcacccattccccaaaagaacttattattttgtgattggaatataggaggacattaaacatgatttcagttaacgatttccgtacaggattaacaattgaagtagatggcggcatttggcgcgtcgttgacttccagcacgtaaaacctggaaaaggtgcggcatttgtccgctctaaactccgcaaccttcgcactggcgcgattcaggaaaaaacattccgcgctggtgaaaaagtagcgaaagcgcaaatcgaaaccaaaacaatgcaatatctatatgcaaacggagatcagcacgtatttatggatacttcttcttatgagcagcttgaactgagcgcaactcaaatcgaagaagaattaaaatacctgctagaaaacatgtctgtgcatatcatgatgtaccaggatgaaacacttggtatcgaacttccaaacacagttgagctgaaagttgttgaaactgaacctggtattaaaggtgatacagcgtcaggcggtacaaaacctgcgaaaactgaaaccgggcttgttgtaaacgtgccgttctttgtgaatgaaggcgacacacttgttgtcaatacatcagacggttcttacgtttcaagagcatagaaagaaaaaaagaagtctgttcccaaatgggagcaggctttttttttgtgcccaaaaacagaatctttcttttatacgaaaatgacaagactacttcagcaagctagagcatatcatataaaaaaatgggaggttgggagagtgctatgaaatttttacttggaaatatcaattctactgttttaacaatggcgggattacgagttttatcctctatgattgagctgacggcagcaattgtcatgcttgtgaccaacgatgtccggaaggcggttgtggttaacagcattctcgctattgtcggtccgttgatttttatcattacgatgactgtcggaatctaccaaattgccgggcagctttcgtatgcaaagctgattctgatttttacgggtgttgttttgattttggcgggtgttcataaataaagagaggcttgtcataaagtctgcctcacatcatacattttaaagaagccaatcggtagaaaggaggaggctctgttgaatgaaatcgctgaggttctccctgaatccatgaaaaacgccctttctgaaataccggaacaacaatggctggaaatcgaagaagtcagaattcggatcaaccgccctgttgaattgattcgaagaggacaacctgtttatttgtcctatgcgggcacggccgaggatgcccatctgatcctgagccggcttagcaactatagtatgtatactcttgaagaagagctgaagaaagggtatgtcacgatcagaggcggccacagagtcggactggcgggcagagtgattacggaaaacggaggtgtgaaaggcctccgtgacatcgcatcttttaatatacgaattgcccggcaaaagctggggattgcggagccgctgcttccatacttatatcaaagcagctggctgaatacgctgattatcggaccgccccaaaccggcaaaacaacacttctccgggaccttgcgaggctctcaagcaccggcaaaaaacccatgctgcccgtaaagacaggaatcgtcgatgaacggtcagaaattgccggatgtcttcgcggtattccgcagcatcaatttggtcagagaattgacgtgttagacgcctgtccaaaagctgaagggctgatgatgatgattcgatccatgagccctgaggtgatgattgtcgatgaaatcgggcgtatggaagatacagatgcacttctggaggcgctgcatgccggtgtttcagtaatcgtatcggcgcatggctggagtatatccgacctgatgaagcggccttcattgaagcgtttgtgggaagaaagagcctttgaccgctatttggaattatcaagagcaaaagggccgggcacagtgagccaaatttatgacaaagacggaaatgtgctgtctaggacgacgggcgtgaaaacatgctgaagctgctgggcgctgtattcattgtggtagcgacaacatggacaggttttgagatggcgaagatttatacagaacggccgcggcaaatccgccagctgcgtgcggcgcttcaatccctcgaggctgaaatcatgtacggccatacaccgcttcatactgcttcacagcagattgccaaacagctcgcacagcctgtttcagctcttttttccgcattcagtgatcagctggacaagggaagtgattccgcgaaaacggcgtgggagcaaagcttaaagaaggtatgggataccctgtctttgaaaaaaagcgaatacgaagtgctgaagcagtttggcgagacgctcgggattcatgatcgaatctctcagcaaaagcacatcaagctggcgctgtcacatttggaagcctctgaagcggatgctgagcaggcgcaagcgaaaaatgaaaagatgataaaaagtttgggctttttagcgggcttgttactcattcttctattgatgtaaacgtgaggggagcaaaaataaaatgggagtagacgtgaatgtcatatttcaaatcgccggagtgggaatcgtggtcgcttttttacacacgatattggatcagatgggcaagaaagaatatgctcagtgggtgacgctgttaggttttatctatattttatttatggtcgccacgattgtagatgacctatttaaaaagataaaagctgtgtttttattccaaggataggggggcttgcagattgacattgttcaaattgtaggtttagggctgatcgccaccttcctttctttaattgtaaaagaacaaaagccgacttttgcgtttttaatcgtcgtttttgccggatgtgccatttttctttatttggtagaccaaatctacgacattattcgaatgatagaaaaaattgcgattaatgcaaatgtcaacatggtctatgttgaaaccattttaaagattatcggaatcgcctatattgctgaattcggggcacagctcacaaaagatgccggtcaaggagccatcgcctcgaaaatagaattggcggggaaaattttaatactcgtaatggctgtgcctattttaaccgtcattatcgaaacgattctcggacttataccttctatgtcataaccgaaaggaggcggtagattgaagcgctttcaatgggttttgcttttggccgtgctgatcatagcaggccgtgcagaaattgtacaagcagctggtaatgcagaacaaacggaagaccatgctgaaacagccgagcaattagcggaaaggacagcagcctcgcttgaaacagataagatcggggaattttggaatgacattatgacagaatacggcggactgctgccggaaagccaaaaaggcagcttaatggagtttatcaatggtgataaatcattctcaccgcaagaatggctgaaagctctcttttcttacttgtttcatgaagtgcttgccaacggaaagctgctgggcacattgattttgctcacgattttttgcgtcattctgcagcttttgcaaaatgcttttcagcaaagcaccgtcagtaaggtcgcttactcaattgtgtacatggtgctgattatccttgcgcttaatagctttcatgtggcaattaactatgcaactgaggcgattcagacgatgaccagctttatcctggcgctcattccgctcctcttggcgcttttggcttcctcaggcggagctgtatctgctgccttctttcatcctgttatcctcttcctgatgaacacgagcggtctcttgattcagaatatcgtcatgccgctgatttttttatcagcgattctgagcattgtcagcacgatgactgaacaatacaaagtaacgcagctggctaacctgctcagaaatatcgccatcggagcactggctgtttttcttaccatctttctcggcgtcatctctgttcagggagcctcagctgcagtgacagacggcattacgctcaggacggctaaatttataaccggaaattttattcctgtgcttggccgaatgtttacagacgcaacagatacagtaatcagcgcctctttactgctgaaaaatacggtagggattctcggtgtcgctattttgatctgtatcgcggcatttccggcaatcaaagtgctttccctcgcttttatttataagctggcagccgcgattcttcagccgctaggaggcgggcccgtcatcacctgcctcgacgtcatcagcaaaagcgtcatttatatttttgcagctctcgccattgtgtctctcatgttttttttaagccttactgtcataatcacagccggaaacctcacgatgatgatgaaatgaaggaggcaggcgaatgagttttttaacggaatggcttaccaccatcgtgttgtttatcctatttgcaattgtgattgatatgctgctgccgagctccagcatgcaaaagtacgcaaaaatggtagtcagcctgctattgattgtcgtcatgcttacgccgatttttaaacttttcaagacagaccccgaagtcatctttgaatacctcacaaaaaacgggcagtcagagtctgccgacataaaaaatcaaatcaattcaaaaaaaatagaaatacaagcttcccagcgcgcatatattctagaagaaatggctgtccaactaaaaaagaaagcggaggagagattcagtcatgatgaatataaagtaggccgcatcaaactcacggcaggagaaaaggtagattcagaagaggatattaaaacaatcagcgtgtatatggccccgtcttctgaaaaaacggtccaaacggtcgcgccggtccacattgatacagatcatgcatacgtaacaaaagaagcagccgaacaaaaagaagccaaacagatacaaacgcagctcgcggacatttgggaaatcggaagtgagaaaattacggttcatatggaaggcggggagagtgtcggcaatgaataaaaacggattatggaatgtattgaaaaagcagtttcttccgggacaaacgaaggacggcgaaaagccgaagctgaccaaatatcattactttctattcgtttttgttctcggagtttcctttatgcttgtcagccagctgttttcttcacctgagaaaactgaaaacgccaaaacgataacggccgtatcatcacaacattccgcagacagcaaagagaaaacagccgaagtgtttaaagcctcaaaatctgataaacctaaagactcgatcgatgactatgaaaaagaatacgaaaatcagctgaaagaaatccttgaaacaatcattggtgtggacgatgtctcggttgtcgtgaatgtagatgcaacgtcgctgaaagtatacgaaaaaaacaaatcaaacaaaaatacaaccactgaagaaactgacaaagaaggcggaacaagaagcgttacagaccaaacatcggaggaagaaatcgtcatgatcaaaaacggcgataaagaaacacctgtcgtcgtccaaacgaaaaaacctgatatacgcggtgtactcgttgttgctcaaggagtggacaacgttcaaataaaacaaaccattatcgaagcggtgacacgggtcctggatgttccaagccaccgggttgcggttgcccctaaaaaaataaaggaggattcataaatgcttaaaaaacaaaccgtttggctattaacaatgctcagtcttgtcgtggtgttaagcgtctactatatcatgtcgccggaaagcaaaaacgccgtgcagatgcaaagtgaaaaaagcgcgtctgacagcggagaggtcgcaactgaaaaagcgcctgccaagcaagacacgaaggaaaaaagcggtacagaaactgaaaaaggaaaagaagatggaacaaagggaacgaaagattcatcagcagacaaggaaacatccgctgaagccagtgaaaaaggaactgttgttacggaaacagccgatgatgatctgtttacaacgtaccgtcttgatttagaagatgccagaagcaaagaaagagaagagctgaatgccattgtgtcaagcgatgatgcaacagccaaggagaaaagcgaagcatacgataaaatgacggctctcagtgaagtggaaggaacagaaaaacagcttgaaacgctgattaaaacacaaggttacgaggatgcgctcgttaatgctgaaggagataaaatcaatattacagtcaaatcagacaaacactccaaatcgaaggcgacagccattatagaccttgtggcaaaagaaatcaaaacaatgaaagatgtcgctgtcacatttgaaccatccaagtaagaaagaggaaaaagaagcccgctaaacaagcgggctttttgcattgctgtcatattagagttgaattcaaaagtccgctcctgtaagatgaacatagtatgtacttttagtagtaacctataaaaaagaaatttcatacataggagtgcgattgaatgttaaatatcaaagaaatccacgagctgattaaagcaattgacgagtctacaattgacgaattcgtatatgaaaatgaaggtgtatccttaaaactgaaaaaacatgaagcaggtacggttcaagtcatgcagcaggcaccggcagcacctgtacaagcacaggctccgcaggcagttcagccgcaagcgcagcaagcagcggcacctgcccaagaagcaccaaagcaagatgagaatctgcataaaatcacttcaccaatggtaggaacattttatgcttcttcatcaccggaagctggcccgtatgtaacagccggttcaaaagtaaatgaaaacacagttgtctgcattgtagaagcgatgaagcttttcaacgaaatcgaagcagaagtgaaaggcgaaatcgttgaagtattagtagaaaacggccagctggtcgaatacggacaacctctatttcttgtaaaagcggagtaaggagactgaacatgattaaaaagctattgatcgccaacagaggagaaattgctgtcagaatcatcagagcctgcagagagctcggaattgagactgtcgctgtttattcagaagctgataaagatgcccttcatgttcaaatggccgatgaagctttttgtatcggaccgaaagcatcaaaagacagctatttaaacgttacaaatattgtgagtgttgcaaagctgactggcacggacgccattcatccgggatacggatttttagctgaaaatgctgatttcgctgaattatgtgaagaagtgaatgtcacgtttgtcggcccgagcgctgacgccatttcaaaaatgggaacaaaagacgttgcgcgggaaacgatgaaacaggccggcgtgccaatcgtaccgggttcacagggaattatagaaaatgtggaagaagcggtttcgcttgctaatgaaattgggtatcctgtaattataaaagccaccgcaggcggaggcggaaaaggaattagggttgcccgcactgaagaggaactgattaatggcattaagattacacagcaggaagcagcaactgcatttggaaatccaggtgtatacatcgaaaaatacatagaagattttcgccacgttgagatccaagtgcttgctgataactacggaaatacgatccatttgggcgaacgcgactgctcgatccaaagacgcctgcaaaagcttttggaagaatcaccatctcctgcccttgattcagaaatcagggagcaaatgggagatgcagcagtaaaggctgcaaaagcggttggctatacaggtgctggaacagttgaatttatctatgactacaatgaacagcgctattacttcatggaaatgaacacgagaattcaggtagagcacccagtcacagaaatggtgacgggaactgacctgatcaaggaacaaatcaaagtggcatcaggaatggaactgagcctcaagcaagaagatgttgaatttgaaggctgggccatcgaatgccgaatcaacgcagaaaacccaagtaaaaatttcatgccgtcacctggtgaaattaaaatgtacctgcctcctggcggtcttggtgtccgtgtcgattcagctgcgtaccctggctattccatcccaccgtactatgacagcatgattgcaaaggtaatcacatacggaaaaacgagggatgaagcgattgcccgcatgaagcgcgcattgagcgaattcgtcatcgaaggcatagagacaacaatccctttccatttaaaactgcttgaacacgaaacatttgtgagcggagagtttaatacgaaatttttagaaacatatgatgtaatgggctcataatttttacggaggtgaattgaatgaaagacaacagcttgcttaaaatggatcacgaagatacgcatttgggtaaggttgagattgcaccggaggtcattgaggtcattgccggcattgcagcatcagaagttgatggggttgccgaaatgcgcggaaactttgcgacaggcgtcgtcgagcgctttggcaaagtgaatcatggcaaaggtgtcaaagtcgacctggcggatgacggaattacgatcgatgtatactgtgtcgttacatttggcgtttcgattccgaaagttgcagcatccgttcaggaaaacattcgtcaaaccttattaaatatgacgtctctttcgattaacgagatcaatattcacatcgtcggcattcaatttgacacaaaagcccaagaagtccaaatcgacgaagaaatgtaaatggcttaacacgaaaccaaggggagggcggccctttggtttttttacacgttaccctttatttcaaagcatgaagaaagccggcttacatagccgagtttcttcatgaacgtgaaatccgaataatcatattaaggtgtgtgaaaatattcggtaatagggtaaaaaaaccttgatttcaatatgcggatacgaaaaaaatatgttatgatctctttgtggcttaacgacaagcggataaagaggatcaaaggagaaagaaaatgaaaagaagaacagcaagagaaaaagctttgcaggcactatttcaaattgatgtcagcgatattgcagtgaatgaagccatagaacacgcactggatgaagaaaaaacagatcctttctttgaacagcttgtacacggggtattggaacaccaagaccagctggatgaaatgatctccaagcatctggtgaattggaagctcgatcggattgccaatgttgaccgtgcgattttgcgcctggcagcatatgaaatggcatatgccgaagacattccggtgaatgtctccatgaacgaagcgattgagctggcaaaacggtttggtgatgacaaagcgacaaagtttgtaaacggggttctttctaacattaaatctgatattgaacaatcataggaggaaagaaaatgactgcaacaatcatcgacggaaaagaaacggctagagaaaaacgcgaacaattggcaaaagaggtagaagagcttaaaaagcaaggcgtcactcccggactggcggttattttgattggagatgatcctgcttctcactcttacgtgcgaggaaagaaaaaagcggcagaaacaatgggaatgaatttcaagctcgatcaatttgacagtagcctcacagaagctgaactgctttccattattgatcaatataaccaagaccctgagtttcatggcattctcgttcagcttccgctcccagaccatatttctgaaaaagcggtgatcgaacgtatctcccctgataaagatgtagacggttttcatccgttaaacgtagggaaaatgctgcttggcgaagatacgtttcttccttgcacgcctcatggaattgttgagcttttgaagaaaaccaatattgacctttccggtaaagaggttgttgtagtcggccgaagcaacattgtcggcaaacctgtcggccagcttttattaaatgaaaacgcgacggttacttactgtcattcaagaacagaaaatattactgaacatacgaaaaaagcggacatcctggtggtggcagtcggcagagccaacttcatcagtgcagaccagatcaaagagggcgctgttgtcattgacgtcggcgttaaccgtctggaaaacggaaagctttgcggagacgttgaatttgaaggggcaaaggaaaaagcgtccttcatcacgccggttccgggcggagtaggtccgatgaccatcacgatgcttgcgcataatactgttaaatctgcgaaacgtacgttatcatagataattggagatattcacaggcgaaatgtttacctgccttgaatatgagcacgatacccgcttcttcaggctcctaaagccagggcgggttttctttagttatggtgcaggaatgcttaggagaggagtttttagacatgggtgaagcagcgtatgtgaccgtctcagcgctgacaaagtatataaaacgaaaattcgatgtagatcctcaccttgaaaatatttggattaaaggcgaattgtcgaatgtgaagatacacacacgagggcatatttatttcactttaaaagacgaaaacgcaagaatgcagtcggtgatgttcgcgagacaaagcgagcgtctgccttttaaacctgaaaacggaatgaaagtgctggtcagaggcggaatttccgtatatgaaccgagcggaaactatcaattatatgccaaagaaatgcagcctgacggggttggagcgctttatttagcgtacgaagaattaaaaaagaagcttgccggagaaggtttatttgacgaccgctacaaaaaacaaatccccgcatttccagccacaatcggggttgtgacatctccaacgggtgccgctgtcagagacgttattacaactctaaaaagaagatatccccttgtaaaagtcattgttcttccagcgctcgtacaaggtgaaaatgcgagcagatccatcgttacgcgcattgaagaggcaaatgaaaaagagatttgcgacgtattaattgtcgggagaggcggcggttcgatagaagaactgtgggcattcaatgaagaaattgtagcacgcgccatctttgcttccaatattccgattatatcggcagtcggacatgagacggattttacgatcagtgattttgtcgccgatatcagagccgcgacgccgacaggagcagctgagattgctgtgcctcataccactgatttaatcgaacggacaaaaacagcggaagtcagaatgacaagagcaatgcagcagcatctcggccagaaaaaagaacggatacaaacgctgcaatcgtcctatgcctttcgttttccaaagcgtttgtatgcgcaaaaagagcagcagtttgacctcgcgtaccagcagtttcaagcacagctgaccgctcttttagatcggaaaagcagacagctggagcgtgaaacgtacagattagaggcactgcatcctcatgaacagctgaaacaagcgagaacacgataccaggaacaaacaaatcagctgagaaaaaatatgaatatccaaatgaagcagctgcattcccaatttcaaaccgttcttggcaagctgaatgcactaagtcctcttcaagtgatggaaagaggatacagcttggcttataaagaagataaactcattaaaagtgtcagtcaaatagaagagcaggaccggcttgaagtcaagctgaaggatggcgtgctgacctgtgaagtattagaaaagagaggggaagaaaaatgacagacgtgaaaaaaaatgaaaacatgacatttgaagaagcgatgaaagggcttgagagcattgtatcaaagcttgaagagggagatgtgcctctagagcaagccattaactatttccaagaaggcatggctctgtcaaaaatgtgccatgaaaagctgcaaaaagtcgaaaagcaaatggacttcattttaaaagaagacggcgaactggcacctttcagtgttcaggaggaagacgaaggtgacaaataaattaacgagctttctggcggaccggaaaaaaacaattgaaaatcagctttctgtctatacagaaaagcttgatatgccggactcattaaagaagtctatgctgtattctctacaggccggcggaaagcggttgcggcctctgattgtactggctgttttaaacgcatatggaaaaagcgaaaaagacggcattccggtgggctgtgctgtcgaaatgattcacacgtattcgttaattcatgatgatcttccatgcatggatgatgacgatttgcgccgcgggaagccgacaaaccataaagtgtttggtgaagcgacggcagtattagcgggtgacgggctgctcacagaaagctttaagctgattacctcccacgtgtcagacgaggtgtcagcagaaaagcgcctgcggcttgtgaatgaactgatttcagcggcaggcaccgaaggcatggtcggtgggcaaatagctgatatggaagcggaaaaccgacaagtcacgcttgaagagctcgaatccattcatgaaaggaaaactgccaagcttcttggtttttgtgtaatcgccggtgctattttggctgatgcgcctgaggaagacattgaaacactgcgtaccttcagcagccacattggaatcggatttcaaatcagagacgatattttagatttagaaggcagtgaagagaaaatcggcaaacgtgtcggctcggataccacaaatgacaaatcgacatacccgtcgcttctttcattggaaggggccaaacataaattggatgttcatataaaagaggcgaagcgattgatcggcggactctctcttcaaaaagaccttttatatgagctttgtgatttaattgcggcaagagatcactaaaacgatcctaatttgaagcggctgcacgaggtatggtaaaatgtaagcagtttatatgaaaaatgaaaaggaaaagcgcgtttgtctttttttatgtctgagattattgtcagctcggcatgcaaaagacatgtatcattgcagaaattcatgctgaaagtgagttgatccgctttggatcttttatcaatacaggacccgtcgtttttaaaaaacatgtccattgatgaattagagaaattaagtgatgaaatccgtcagtttttaattacaagtttatccgcttccggcggccacatcggcccaaacttaggtgtcgtagagcttactgttgccctgcataaggaatttaacagcccgaaagacaaatttttatgggatgtaggccatcagtcgtatgtccataagctgctgacaggacgcggaaaagaatttgcgacgcttcgccagtacaaagggctttgcggatttccaaagcggagtgaaagcgagcacgatgtttgggaaaccgggcacagctcgacttctctgtcaggcgcgatgggaatggcagctgcccgtgatattaaaggaacggatgaatatattattccgatcattggtgacggcgcgctgaccggcggtatggcgctcgaagcccttaaccacatcggcgacgagaaaaaagacatgattgtcatccttaatgataatgaaatgagtattgcgccaaacgtcggtgccattcactctatgctcggacggctccgcactgcggggaaataccagtgggtcaaagatgagcttgaatacttatttaaaaagattccggcagttgggggcaagcttgccgccacggcggaacgggtcaaagacagcctgaaatacatgctcgtctccggaatgtttttcgaggagctcggttttacgtatttgggcccagtggacggacattcttatcatgagctgattgagaatcttcaatacgccaaaaaaacgaaaggccctgttcttctgcacgtcattacgaaaaaagggaaggggtacaaaccggctgagaccgatacgattgggacatggcatggtaccggaccatataaaattaataccggtgactttgtaaagccgaaagccgcagctccttcgtggagcggtcttgtcagcggaactgtgcagcgaatggcgcgcgaggacggacgcattgtagccattacgccggctatgcctgtcggttcaaagcttgaaggcttcgcaaaggaattccctgaccggatgttcgacgtaggaatcgcagaacagcatgccgcaacaatggctgcagctatggcaatgcagggtatgaagccgtttttggcgatttactcaaccttcctgcaaagggcatatgaccaagttgttcatgacatctgccgccaaaacgctaatgtgtttattggaattgaccgtgctggactcgttggcgctgatggagagacacatcaaggcgtgtttgatattgcgtttatgcgccacattccaaacatggtcttaatgatgccgaaagacgaaaatgaaggccagcacatggttcatacagcacttagctatgacgaaggcccgatagcaatgcgttttccgcgcggaaacggactcggcgtaaaaatggatgaacagttgaaaacgattccgatcggtacgtgggaggtgctgcgtccagggaacgatgctgtcatcttaacattcggcacaacaatcgaaatggcgattgaagcagccgaagagctgcagaaagaaggcctttccgtgcgcgttgtgaatgcgcgttttattaagccgattgatgaaaagatgatgaagagtatcctaaaagaaggcttgccaattttaacaattgaagaagcggtcttagaaggcggtttcggaagctcgattttagaattcgctcatgatcaaggtgaatatcatactccgattgacagaatgggtatacctgatcggtttattgaacacggaagtgtaacagcgcttcttgaggaaattggactgacaaaacagcaggtggcaaatcgtattagattactgatgccaccaaagacacacaaaggaattggatcatgacgtcaaagaaagaacgattagatgtattattagtggaaagagggctggcggaaacgcgtgaaaaagccaaaagagccattatggcggggatcgtctattcaaacgaaaaccgcttggacaagcctggagaaaaaattgaccgcgaccttccgttaactgtcaaaggaaacccgctgaggtatgtgagcaggggcggcttaaagctcgaaaaagcgttgaaggaatttcccgtctctgtcaaagataaaattatgattgatattggctcctccaccggcggttttacggactgcgctttgcaaaatggagctaaacagtcatacgctgtggatgtaggctataatcagcttgcatggaagcttagacaggatgaacgggtcgtcgtgatggaacggacgaactttcgttatgcaacaccggcagactttacaaagggcatgccggagtttgccacaattgatgtgtcctttatttcactgcggctcatcctgcctgtcctaaggactttgctcgtaccgggcagcgactgcatggctttagttaagcctcagtttgaagcgggacgggaatccgtcggcaaaaaagggattgttagagatcctaaagtgcatgctgatgtgctcaagcgaatgatcagtttttctgccgctgaaggctatatctgtaaaggcttgtcattttctccaatcacgggaggagacggaaatattgagtttctccttcatttgcattggccgggagagggacaggaaggccaggaactgccggaagaagagatcatgcgcgttgtagaagaagcacataagacgttaaaagaaaaaaaagcagatgtaccggaataatagggcgctattattccttttttctgcattcatgtacaatgtgcagagaatcatataacataaaagaacagataagcttggaaatagaggtgcttacatgaacaaaggccagaggcatattaaaatcagagagatcattacaagcaatgaaatcgaaacgcaggatgaattggtcgacatgctaaagcaggatggatacaaagtaacgcaggccacggtatcacgggatattaaagaacttcaccttgtaaaagtgcctacaaataatggttcttacaaatacagtcttccggcggaccagcgtttcaatccgctgtcaaagctaaagcgggcattgatggacgcatttgtgaaaatagactcagcaagccatatgattgtgctgaaaacgatgccgggcaacgcccaggcaatcggggcgctgatggacaatttggactgggatgaaatgatggggaccatttgcggagatgatacgattttaattatttgccggactcctgaagatacagaaggcgtaaaaaataggctccttgaactgctgtaacagaaaatctaacaaagataagaggtgtaatgctgtttgttagctgaactatcgattaaaaactttgccattattgaggaactgacggtttcttttgaacgcgggcttacggttttaacaggagaaaccggagccggcaaatccatcatcatagatgccatttctcttttagtcggaggccgcggatcatctgaatttgttagatatggggaagcaaaagccgaacttgaagggctgtttctgttggagagcggccatcctgttttaggcgtatgcgctgagcagggaatcgacgtttcagacgaaatgatcgtcatgagaagggatatcaacacgagcgggaaaagcgtttgccgtgtcaatggcaagcttgtcacgattgcttcgctaagagagatcggcaggcttttattagatattcacgggcagcacgataaccagctgttaatggaagacgaaaatcatctccagcttttggacaagtttgccggggccgaagtggaaagcgcgcttaaaacgtatcaggaagggtaccagcggtatatgaagctgctcaaaaagcttaagcagctttctgaaagcgaacaggaaatggcccatcgtcttgatcttattcaatttcagctcgaagaaatcgaatcggcaaagcttgagcttaacgaagatgaacagctccaagaagagcgccagcaaatttcaaactttgagaagatatatgagtcgctgcaaaatgcatataacgcgcttcgcagtgagcagggcggattggactgggttggaatggcatcagcgcagcttgaagatatatctgatataaacgaaccgctgaaaaaaatgtctgaaagtgtttcgaactcctactatttgcttgaggatgccacatttcagatgagaaatatgctggatgagcttgaatttgatccggaacgcctgaactatattgagacgcgacttaatgaaatcaaacagctgaaacgaaaatacggtgccactgttgaagacattttggaatatgcttctaaaattgaagaagagattgaccaaattgaaaacagggacagccaccttcaaagcttgaaaaaggagcttgactccgtcggcaaagatgtcgcagtggaagcggcaaatgtgtcacaaatccgaaaaacatgggcgaaaaagctggctgatgagattcatcgggaattaaaaagcctgtacatggaaaaatcaacttttgatacggaatttaaggtcagaacagcgtcacgcaatgaagaggcgccgcttgtaaacggccagcccgttcagctgactgaacaagggattgacctggtgaagtttttaatttcaaccaatacaggcgagccgctgaaatccctttcgaaagtcgcttcaggtggagagctgtcacgggtgatgcttgccataaaaagcattttttcctcacaacaggatgtgacatcgatcatttttgacgaggttgataccggtgtaagcggcagggtcgcacaggcaattgctgagaagatccataaggtgtcaataggatcacaagtgctgtgcattacacacctgcctcaggtggctgccatggccgatacgcatctttatattgcgaaggagttaaaagacggcagaacgacgacacgtgtcaagccgctctctaagcaggaaaaggtagcggaaatcgggcgcatgattgcaggtgtcgaagtaaccgacttaacgaaacgccatgcgaaagaacttttaaaacaagcggatcaagtcaaaacaactgggtaagctgcgcgagaagcgcagcttatttttttcgtgcacatccattcgttcatcagtatatccaatgtttttcttcatatgacagttataaataagccgtcagaaggcaaaattaaatgatgtagcagcaagtcataaagaaggtgtgggataggagcgaggagagtgaagtagtgaatgcccgataacatcagaaaagcagtaggtttaattctccttgtttcgttattaagtgtaggtttatgcaaaccgctaaaagaatatttactgattccaacgcaaatgagagtatttgaaacccaaacacaagcgattgaaacgagtttatcggtaaacgctcagacatcagaatcctcagaagcgtttacagtaaagaaagatccgcatgaaatcaaggtgacgggcaaaaaatcaggtgagtcagaattggtatatgatcttgccggatttccaattaaaaaaacaaaagtgcatgttcttcctgatttaaaagttatacctggcggacaatcaatcggtgtaaaacttcattccgtcggtgttcttgtcgtcggatttcatcaaatcaatacaagtgaaggcaaaaaatctccgggagaaacggcaggaattgaagcgggcgacatcattattgagatgaatggacagaaaattgaaaaaatgaatgatgtagccccatttattcaaaaggctgggaaaactggtgaatctttagacttactgatcaaacgtgataaacagaaaatcaaaacgaagctgatcccagaaaaggatgaaggagaaggcaaatacagaatcgggttatatatcagagattctgctgccggcatcggcactatgaccttttatgaaccgaaaacaaaaaaatacggagcacttggccacgtgatttccgatatggacacaaagaaaccaattgtagtggagaatggagaaatcgttaaatccactgtaacatcaattgaaaaagggacaggcggtaatccgggagaaaaactggcgcgattttcctcagaacgcaaaacgatcggggatattaacaaaaacagcccgtttgggattttcggcacactgcatcagccgattcaaaacaacatatcagatcaagcattgccggttgcgttttctaccgaagtcaaaaaagggccggctgaaattttaaccgttattgatgatgacaaagtagaaaaattcgatattgaaatcgtcagcacaacgccgcaaaaattccctgcgacaaaaggaatggtgttgaaaattaccgatccaaggctgttgaaagaaacaggaggcatcgtacaggggatgagcggaagcccgattattcaaaatggaaaagtgatcggtgctgtcacccatgtatttgtaaatgacccgacaagcggctacggtgttcatattgaatggatgctgtcagaagcaggaatcgatatttatggaaaagaaaaagcaagctgactgccggagtttccggcagtttttttattttgatccctcttcacttctcagaatacatacggtaaaatatacaaaagaagatttttcgacaaattcacgtttccttgtttgtcaaatttcatttttagtcgaaaaacagagaaaaacatagaataacaaagatatgccactaatattggtgattatgatttttttagagggtatatagcggttttgtcgaatgtaaacatgtagcaagggtgaatcctgttaactacatttggggaggaagaaacgtggagaaaattaaagtttgtgttgctgatgataatcgagagctggtaagcctgttaagtgaatatatagaaggacaggaagacatggaagtgatcggcgttgcttataacggacaggaatgcctgtcgctgtttaaagaaaaagatcccgatgtgctcgtattagatattattatgccgcatttagacggacttgcggttttagagaggctgagggaatcagatctgaaaaaacagccgaatgtcattatgctgacagcctttggacaggaagatgtcacgaaaaaggccgtcgatttaggcgcgtcctactttattctcaaaccgtttgatatggaaaaccttgtcggccatatccgccaggtcagcggaaatgccagcagtgtgacgcatcgtgcgccatcatcgcaaagcagtattatacgcagcagccagcctgaaccaaagaagaaaaatctcgacgcgagcatcacaagcattatccatgaaatcggcgtcccagcccatattaaaggctatctctatctgcgcgaagcaatctcaatggtatacaatgacatcgaattgcttggcagcattacaaaagtcctctatccggacatcgccaaaaaatttaacacaaccgcaagccgtgtagaaagagcgatccgccatgcaattgaagtggcatggagcagaggaaacattgattccatttcctcgttgttcggttatactgtcagcatgacaaaagctaaaccgacaaattcggaattcattgcaatggttgcggataagctgagattagaacataaggcttcttaaacatgagcttattaagtggtcattaaatcaaacgtcttttatttattagtttgcgctgataaataggaggcgttttgttttggggacatttgtagtatgggagaagaatattaagtatccgcatatagtaaaggataggtttgaaaagtaaggaaagcaaatggcggtattacctgcactcttggtccattcatacatcttataggatcacgaagcatgatcgaccctaaatgtgtccgttataaaatgaaacctttctcctgcaaaatcgtaagtaaggcgtattcatgtaaaaaggagacgtacgaatgaaaaagaaaaaagcaagaaagcgtgaggggtttttcctggattttcttttcgaagttggtggggagctctttcttttgctgtttagatgtgtacacaaactatttatataaagggaaaaagactgccgaatcgtttcggcagtcttttgcacattaatctttataaggcacccagcctggcgtgttcacaattgctttccaaagcggttcaggcaaatgatatttttctttatctgtgcctttgatcactgtttcgatttgcttttcacggccttcttttacttttaccgtccagtcagggtcaactagaatttcgcgtcccatagcgactagcggaataccgttttcgatgacggcaagcgcgtcatcagcggaatggatggaaccgacggcgatcagcggcactttgtttccgacacgttcattcaataagtccatgcgtgtgcgagtcggatctgcaccgcggcgcgcttttgagttcacgtccatcagtgagatatgaagatagtccaattctttatcccctaaagcatcaacaagcgtataagtttcagtcattgtcaatcccggtgtctcaggttcttccggagacagacggtagccgactaagaacgcacccttcgcatgttctgaagcggcttttttcacttcatcgacaatagcgagcgggaaggctaatcgtttttcatcgcttcctccccagcgatccgtgcgctggttggttttcggagaataaaactgctgaattaagtagccgtttgcaccgtgaatttcgacaccgtcaaagcccgcttcaatggcacgtcttgtcgcttctccaaacgccttcacaatgttttccacttcttcttcttttaatgcgcgagcaatttgtttgccgttatcaaacacgtcacttggccccacaacatcttgttgaggaacaagctcagacgggcactcaataccgccgtgatgaatttgtacaacagctttagcgccttgtgcctgaatggcttgtgctaacttttttaaacctggaatgttggaatcgtcatggatggccggctgcccggggaatgcttttccgtccggtgtaacatttgcgcaggctgtaatcaccattcccatctcttttgaacgggggatgatgtagtcgagctccgcttcagatattgtaccgtcttcattagaagcgtaatgagtcatcggtgctactgcgatccggttgtcgattgtaacgccgcttttaaacgtaaatggttcaaacagaggcttatacttaggattcatttgatcatcttctttcgtttggattcgcacatattctagcctatatgtaaaaattaatgcaattgatctgctttaccgactgaatatcttgagtgcagagtgatgttttcgccgctctttttcggggcctttgtagccgccgctgatttggtggccgatggagcatgtgatgacagttgccgccagcagcagaacgaattttttcatggctttaacttctttcaataaagtaaatatcctttaaaaggttacgcttggctgacccacccgtcaaacgatttgctcaccctattctcaaattttttaaaatgaataaaaagttgcttctttccgctaattttttctaattggcgcctcaattagagccatcctcatagacaaatctgctcgttatctttctaacaacaggaaatgatcgggtcgtatagcccttttgaaaatcatggaacttgctcgcctgcattcgcgttgtctttacaaattcgccattctggtcaaagataaaagccaaacatcaggaagaggtggtcatgtgaaacaaacggttcttttgctgtttactgcgctctttctttcggggtgcagtgttgcaagtgcggatgactcagtgccaaggtttaccgaagagggaaaatacattggctcggctgatcctcatacgattgcggtgtctcttaatggagaagaaaccatgatacaagttccgaaggataaacgtgatgaatgtgaatcactgccagatcagacacatgtcctggtgaaatatacaaagaaggataatggaactttacagctggaagatattcagctgcgaaagaactcgtcataaaaagaccggagggagtaagttgagaatgttatggaggagcttggcgctgtgcggattggctttgacgctcgcgccttgtgcacaggcagcagagccgatagaagggaaaacagtgtatattgatgccggacacggcggtgaagacagtggagcggtcggaaacgggctctttgaaaaggatattaatttggctgtctcagagcatgtgacagacaaactaaaagaggagggagccaatcctgttgcatcccggtctgacgatcattttctgaccttggaggaaagagtggctaaggcaagtgccaatcaggctgacctttttgtcagcattcatgtgaattcaggggttgcttcagcttcaggaacagaaacgtattttcaatctgattatgaaggggagaacagccggcgtctggcatccgatattcagtcacagctcgtttcatccttacaaacgagagacaggggcgtgaaagaatcagacttttacgtcattacatattcacaaatgccaagtgtgttagcggagcttgggtttatcacgaacagctctgatgcggacaagctgggaagtgaagaataccagcaaaaggccgcagatgcgattgtcaacggcattgattcttattatgatcagtagattgatacagccttaatcctagagtggagccgacaaaataagtataatggagaaaactttagggtttgaggtgaaacgatgacaaagatttttgcccaccggggggcatcaggtcaatttcccgaaaatacaatgcttgcatttgaaaaaggaattgaagccggagcggatgggatagagcttgatgtacagctgacgaaagacggacgcattgttgtaattcatgatgaaagacttaatcgcacgacatcacttaaaggattcgtgaaggatacagcctatgatgaggtgaagactgcgaatgcggccgctggtcacgatcaagcgtacagcgatataaaagtgccgctgctagaagatgtgctctcgtgggcggtaaaaaaggattttctcatcaacattgaattaaaaaacagcgtgatccgctatgagggaatggaagaaaaagtgctggaggcagtgaagcgattcaatgtagaggagagagtcatcctatccacctttaatcatgacagcttggcgctatgcgcccggcttgcgccgcatatcgaacgggcagtattaacttcagatgtgctttaccaggcagatcgatatatcgcgtctattccggcttccggctatcacccgaagttaaacagcccaagggtcacagatgaagtgctaaagaaaatgaggaacagttcgattaaggtaaggccgtatacagtcaatcgtccggaagatatgaagcgtctcattgaagcgggagcagacggcatgtttaccgactttccagaaaaggcttcggcattgctgaaaaatgaatagttgttagaaggaggctgtttgacgcagccttcttttttcattcattcatgcccgtttcaaagcatacattcatagaagacaactagaaattgtaagcgctgtctatctgaatgaggtgaaaccatgaggaaaacagtcattgtaagtgctgcaagaactccatttggcaaattcggcggagttttgaaagaggtgaaagctgctgagcttgggggcattgtgatgaaggaggcgctgcaacgggctggagtctctggagatgatgtagaaggaaacgtcatgggcatggttgtccaggccggctcagggcagataccttcccgtcaagctgcccgtctggcgggaatgccttggagtgtgccgtcagaaacactgaataaagtctgtgcttccggccttcgcgctgtcactttatgtgatcaaatgattcgggcgcaggatgcgaacatacttgttgcggggggaatggaaagcatgagcaatattccgtatgccgttcccgccgggcgctggggagcacggatgggggacggcgagcttagggacttaatggtgtatgacggattaacgtgcgcatttgacgaggtgcacatggctgttcacggaaatacagctgccatggaatatgcaatctcacgaagagagcaggacgaatgggcgttgagaagtcatgcaagggcagctaaggctgccgatgaagggaagtttcaggatgaaattgttcccgtcaactggatcggtcgaaaaggaaaaccaaacgttgttgataaagatgaagcgattcgccgtgacacaagtctggatcagctcgcgaaactttctcctatttatgcaagtgacggttctatcacagccggcaatgctcctggagtcaatgacggagccggcgcgttcgtgctgatgtctgaggaaaaagctgctgagcttggcaaacggcctctggctacaattcttggtttttcaactacgggaatgccagcgcacgagctggcggcagcaccgggatttgccattaacaagcttctgaaaaagaacggtttaactgtccaagatattgacttgtttgaagtaaatgaagcttttgcttcagttgttttgacatgtgaaaaaatcgtaggtttcgatcttgaaaaagtaaatgtaaatggcggtgcgatcgcgctcggccacccgatcggcgcgagcggtgcgagaattctcatgacgcttgtttatgaattaaagcgacggggagggggtctgggcgttgccgctatttgtagcggggcagcacagggagacgccgtcttagtgcaggttcattaaaacatgatgaaaaaggggatttgaatggaaatcaaacaaatcatggtagctggcgcaggtcagatgggaagcggaattgctcaaacagctgccgacgcgggcttttatgtgcggatgtatgatgtgaatccagaggccgcggaggcaggattgaaacggctgaagaaacagctggcccgtgatgctgagaaaggaaaaaggaccgagacggaagtgaagagcgtaatcagtcgcatttcgatttctcaaacgcttgaggaggcagagcatgcggacattgtgattgaggctatcgcagaaaacatggcggcaaaaactgagatgtttaaaacacttgatcgcatgtgcccgtctcatacgattttggccagcaatacatcttccttgcctattacagaaatcgctgctgtaacaaaccggcctcaacgggttattggcatgcattttatgaatcccgtacctgtaatgaagctggttgaagtgattcgcggcttggctacatcagaagaaacggccttagatgttatggcattagcggaaaagatggggaaaacagcggtagaagtcaatgattttcctgggtttgtttccaaccgtgtgcttcttccaatgattaatgaagccatttattgcgtgtatgagggagtggcgaagccggaggcaatagacgaagtgatgaagctgggcatgaatcatccgatgggtccgcttgcattagcggattttatcggactggatacgtgtttatcaattatggaagtccttcactcaggccttggcgattccaaataccgtccttgcccgctgctccgcaagtatgtcaaagcaggctggcttggcaaaaagagcggacgcggtttttatgactatgaggagaggacttcctaaagtctattccatccgggggtggccgagttgcatgtaacccaagagcaagtcatgatgcgaaaaatggtgcgagattttgcacgaaaagaaattgctcccgctgcggatatcatggagaaaacggacgaatttccatttcagctgatcaaaaaaatgggtgaacacggactgatgggaataccggtgccggaacaatacggcggtgccggggcggacgttgtttcttatattttggcgattcatgagatttctagaatcagtgcggctgtcggcgtgatactctccgttcatacctcggtcggcacgaatccgattctgtatttcggcaacgaagaacagaagatgaaatatataccaaagctcgcgtcaggagaccatttgggcgcatttgcactaacggagcctcactcggggtcggatgccgggagcctccgcacaacagcaatcaaaaagaacggcaaatatctattaaacggatcgaaaatattcataacgaatggcggagcagctgatatctatatcacatttgctttaacagctccagatcaaggcaggcacgggatttcggcttttattgttgaaaaaaacacacccggttttaccgttggaaaaaaagaaagaaagctggggctttatggctccaatactacggaactgatttttgataatgcagaagtgcctgaagccaatttgcttggcaaagagggggatggctttcacattgccatggcgaatttaaatgtcggccggatcggcattgcggcacaggccctcggaattgcagaggcggctcttgagcatgccgttgattatgcgaagcagcgagtgcaatttggaaggccgatcgcagccaatcaaggcatatcatttaagctggctgacatggcgactagggcagaggcggcaagacatcttgtctaccacgccgcagaccttcataaccgcggcctaaattgtggaaaagaagcgtctatggctaaacaatttgcttccgatgcagccgtaaaggcggcgttagacgccgttcaaatttatgggggatatggctatatgaaggattatccagttgagcgcctgcttcgcgatgcaaaggtgacgcaaatttatgaagggacgaacgagattcaaagactgattatttctaagtatttgcttggcggaacctgatggacaaaaaacgcataaacggaggttgaggatatggaggagaaacagcaatattctccagggttggacggtgtgattgcggcagaaactcatatttcttatcttgacacgcagtccagccagattttgataagaggctatgatttaatagaactttctgaaacaaaaagctatctggagcttgtccatttattgctggagggcaggctgccagaagaaagtgaaatggagacgctggaacgtaaaataaacagtgccgcaagcctgcctgctgatcatctccgtctgcttgagctgctccctgaggacactcatccaatggatagtctgcgtaccggcctgtcggcacttgctggctatgatcggcaaattgatgatcggtctccctccgcaaacaaagaacgcgcctatcagcttcttgggaaaatgcctgccctcactgctgccagctacaggatcattaataagaaagaaccgattcttccgcttcataccttatcctacagtgcgaattttctatacatgatgacagggaaattgccgtcttcattggaagaacagatttttgaccggtcgctcgtcctgtacagtgagcatgagatgccgaattcaacctttgcggccagggtcattgcatctacacattcagatctttatggggctttgactggggctgtcgcttccctgaaagggaatcttcacggaggagcaaacgaagctgtgatgtatttgcttttggaggcaaaaacgacatctgattttgagcagcttctgcaaacaaaactgaaaagaaaagaaaaaatcatgggcttcggccaccgggtgtatatgaaaaaaatggacccaagagcactcatgatgaaagaggcgctgcagcaattatgcgataaagccggtgaccatcgtttatatgagatgtgtgaagcgggtgagcggctgatggagaaggaaaaagggctttacccgaatttggattactatgctgccccggtgtattggatgctcggcataccgattcctttatatacgccggtctttttcagcgcgagaacgtccggtttatgcgcccatgtgatcgaacagcatgccaataatcggctcttccgtccccgtgtcagttacatgggcccgcgatatcaaacaaaatcatgaaaggagctggtagaatgccgaaaacggatcgtgtaatcgtagaaatcacagactatgtgcttgaaaaagagattactagtgccgaagcgtatacaacagcggggcatgtattgctggataccctgggctgcgggatcttggcgctacgatatccggaatgcacaaagctgcttggcccgattgttccaggaacgactgtgccgaatggaagcaaagtgccgggaacgtcatatgttctcgatcctgtgagggcagcgtttaatatcggctgcatgattcgctggctcgattacaacgatacgtggctggcggcggagtgggggcatccatccgataacttgggaggaatccttgccgctgctgattatgtatcaagagtgaggctgtctgaaggaaaagagccgttaacagtacgcgacgtacttgagatgatgatcaaagcacacgagattcaaggtgtgctggcgttagaaaacagcttaaatcgagttggccttgaccatgtgctgtttgtcaaagttgcgacaaccgctgttgcggcaaagcttttgggcggcggaagagaagaaatcaaaaatgcgctttcgaatgcatggattgacaatgcagcattgaggacataccgccattcaccgaatacaggctcgcgtaaatcatgggcggcaggagatgcaacgagcagaggtgttcatttggccctgatgtcgttaaaaggggaaatgggttatccgacagccctgagtgcaccgggttgggggttccaagacgttttattcaataagaaagagatcaagcttgcccgtccgcttgacgcttatgtcatggaaaatgtgttatttaaagtgtcttatcctgcggaatttcacgcccagacagcggcggagtgcgccgtcattcttcacccgcaggtaaagaaccggattgacgagattgaccgagttgtcatcagaacgcatgaatccgctatccgaatcattgataaaaaaggcccgctccacaatccggcagaccgtgatcactgtctccaatacattacagcaatcggtttgctttttggtgatatcaccgcacagcattatgaagctgaaacagcgagtgatccgaggatagataaacttcgtgataaaatggaagtgactgaaaataaaacatataccgaggattatttaaaacctgataaacgttccatctcaaatgccgttcaggttcattttaaagacggaacgagcacggaaatggtggaatgtgagtttcccctcggccatcgttttcgaagagaggaagcagtgccgaaactgctggaaaagttttctgacaatctcaaaacccattttcctgttaaacagcacaaacacatttatgagcgctgtaccagctatgagacattacaaacgatgcgcgtaaatgaattcgtagacatgttctgcatgtaaaagggggattttgtttcatgtcgtggatcgtcaataagcaatcgtcacaagaggagcttgccgggcgtttccgcaagctgatgtcagcaccggacattcttcaaattcccggcgcccatgacgggatggccgctttgcttgcgaaagaagccggtttttctgctatttatttgtccggtgctgcctatacagccagcagggggctgcctgatttagggatcatcacatcggcagagatagctgaacgggccaaagatcttgtgcgtgcagctgatctgcctttgcttgtggatatcgatacgggatttggcggtgtcttaaatgccgcccgaacagctcgggagatgcttgaagccagggtagcagccgttcaaatagaagaccagcagctcccaaaaaaatgcggacatttaaatggcaaacagctagttccgataaaggaaatggcgcaaaaaataaaagccattaaacaagcggcaccctcccttattgttgttgcccgtactgatgccagggcgcaggaagggcttgatgccgcaataaaacgttcagaggtttacattgaggcgggagcggacgcaattttcccggaagcgctacaggcggagaatgaattccgccagtttgctgagcgtatctccgttccgctccttgcgaatatgactgaatttgggaaaacgccgtattatcgtgccgatgaattcgaagatatggggtttcacatggtgatatatcctgtcacctcgcttcgagcggcggcaaaagcttgtgagcggatgtttggtttgatgaaggagcacggctcacaaaaagaaggacttcatgatatgcagacacgaaaagaactgtacgatacgatttcttattatgattatgaagcgttagacaaaacgattgccaagaccgttttgcctgacgaatagtgcaacaaaaaaagccggagcatcctccggcttttttgcagctatcgttttctgaatcgcgggctgacttgattgcgttttctgtctctgtataaaatgaacccggccagcacatagaggccgatcgcaaaaaagatgaatcctgacaacccttggagccaaagagctgaaaatggcttgattgtatggccgaaaagtgtatctctcatcagtttaatgcctaaagcagaaatagccccggggatgactaatattaaaagcgcaagaagtcggctcatcttcagaaaacccctttatcttttcatttcctttattgtccagcggaaaaaatattttgtcaagagaagaaaacgtggtaacatagggttgtgcaaattattgcaacggaataaataggtgtgcaaattttttcatacaaaggggtatcgggatgcaaaaggtactgatagtaggtgccggcaaaaggggaacggcgttattacatattctgattaaaacagccatcatagatatcattgccgtagttgacaaagaccccgaggcgccgggattgaaagaagcagaacagtatgggattgccgtatcatctgattggaaaccttacatacaacaaaaaccggatatcgtcattcatgccaccggcgatcaagccgtgtttgacgagctccttcaaagaaagcatgaagataccattgttatgccgggaaaaatggcatacatcgtttttcagctgatggaagaaaagcagcacctgattcaaatgctaaaagagcaaacctataaatatgacagaatttttaattccacccatgatggaatgatttttattgatatcaatgaagaaatcattctctttaaccatatggccgaaaaaatggtcggaaaaaaacgtgaggaagtcattgggcgcccaataaaagaagtgattccgagcactaagatgccgcggattttaaaaacaagagtgcctgaatacaaccagaagcagctgttaggcgatcatttgcaaattgtgaccacaagactgccgattattgatgaaggcggacgtctgctcggggctctttgtgtgtttaaagatatcactgatgcggtcgagctggcagaggaagtgaccaacttaaagcaggtccgtacgatgctggaggcgattattcaatcctccgatgaggcgatttctgtcgttgatgaaaacggcatcggcctgctaatcaataaagcgtatacgaaaatgacggggctttctgaaaaagaagtcatcggcaagcctgcaaacactgatatttccgaaggcgaaagcatgcatttaaaggtgcttgaaacaagacgtcctgtccgcggtgtcagaatgaaggtcggcccgaatgaaaaagaggtcatcgttaatgtagcaccggtgattgtggacgggattttgaaaggcagcgtcggcgtgattcacgatgtttccgaaattaaaatgctgacagcggagcttaatcgcgccagacaaattattcgcacgcttgaagcgaaatacacgtttgacgacattatcggcaaaagcgagcaaatgctggttgcgcttgagcaggcgaagctcggtgcgaaaacaccggcaaccatcttgctgcgcggggaatcaggaacaggaaaagaactgttcgcccatgccatccataacgaaagtgaccggaaatacaataaatttattcgcgtgaattgtgcagccctttctgaaaacctgctcgaatcagaattgttcggctatgaggatggtgcgttttcaggagcgaagcgcggcggtaaaaagggtttatttgaggaagcaaataacggcagtattttcttagatgaaattggtgagctgacacaaaatatgcaggccaaattgctgcgcgtccttcaagaaaaggaaatcgtcagagtgggcggcacgaaagcgatccctgtcaacgtcagagtgatcgcggcgacaaatgtaaatattgaaaaggcgatggcggacggaacattccgggaagacctgtattaccggatcaatcgctatccgatctccatcccgcctttgcggcagcggttggaggacattgaagcattgagcgtcagacttatccaaaagattaaccgggattacggcaggaatgtaaaagggctctcacaacaagccttgcgcgccttatctgcctaccattggcctgggaatgtccgggagcttgaaaatgtccttggacgagccatgatttttctgaatccgcatatggaatggattgaaaaagatcacttgcctgtattcgaacttgagcaaaaagaaaatgacacagatcagggaacaggttttgattttccggatattgaaggcgaaaagctgtctgtcgcagtagaaaaatttgaagcacatttgatccagcaaacgctcgaaaagcatcattttaaccggacaaaaacagcaaaagctctcggtgtcagcattcggaacttatattacaaaatggataaatatggccttgcaaatgaaggcatgcaataatttgcagaataaacgcaaacatctgcacgaatgtttcaatatacctggtatgacagcacccttaagagctggcatggaacttgcataataaaaggcggagtcgaaacaagaaaggtggtaacagatgaagctgaaagatttaatcggcaaagcgtcgatacacaaaaataagaccattgcggttgctcatgctgaggatgaggaagtgatccgggctgtaaagctggcagccgagcacctatctgcccgtttcttgttaacgggcgacagcacaaaactgaacgagctgacatcatccatgcaagggcatcaagtggaaatcgtccatgccgatactcctgaggaatcggcgaaattagcggttcgtgctgtgcatcataaaacagcggacgttttaatgaaaggcaatgtgccgacttctgttttgcttaaagcggtattgaacagacaggaggggcttcggtcagcaagtgtcctttctcacgtggctgtattcgatataccggattttgaccggctgatgtttgtgacagattcggcaatgaatattgctccttcgctggaagagctccggcagattttgcaaaatgccgttcatgtggcccatgcagtggggaacaatatgccaaaagcagctgcccttgcagcggtcgaaacggtgaaccctaaaatggaagcgaccatgaatgcagctgctctagctcaaatgtacaaaaggggccagatcaaaggctgcattgttgatggaccgcttgctttggataacgcagtttcacaaattgccgcggctcagaaaaaaatttcgggagacgtagcgggcaacgcagatatccttctcgtcccaacaattgaggccggcaatattttatataaatcactgatttattttgccaaggccagcgtggcggctgtcattacaggagccaaagcaccgattgctttaacaagcagagcggactctgctgaaaataaactgtattccattgcgctggcaatatgcgcatctgaagaatacacacattaggaggaacgaacatggaactttttaaatatatggagaaatacgattacgaacaattggtattctgccaggatgaacaatctggattaaaagcgattatcgccattcatgatacaacgcttggtccggcgcttggcggaacgagaatgtggacatatgaaaatgaagaagcggcaattgaagatgcgctcagattggctagaggcatgacctataagaacgcggcggcaggcttaaaccttggcggcggaaaaacagtcattatcggcgatccgcgcaaagacaaaaatgaggaaatgttccgcgcgtttggccgctatattcaagggctgaacggcagatacatcacggctgaagatgtgggcacaacggtcgaggatatggatatcattcatgatgaaacagactacgttacagggatttctcctgctttcggttcttctggaaatccgtccccagtcacagcatacggggtgtacagaggaatgaaggcagcagctaaagctgctttcggaaccgactctcttgaaggaaaaaccattgctgtacagggtgttgggaacgtagcctataacctttgccgccacctgcatgaagaaggagcaaacttaatcgttacggatatcaacaaacaatctgtacagcgtgcagttgaagattttggcgcccgtgcggtagatcctgatgacatttattcacaagactgcgatatttatgcgccgtgtgcccttggtgcgactattaacgaccacaccattaaacagctgaaggcgaaagtgatcgcaggtgcggctaacaaccaattaaaagagacacgccatggtgatcaaattcacgaaatgggcattgtttatgcaccggattacgtgattaacgcgggcggtgtcatcaacgtggcagatgagctttacggctataatgcagaacgtgcattgaaaaaagtcgaaggcatttacggcaatatcgagcgtgtactagagatttctcagcgtgacggcattcctgcatatttagcggctgaccgcttggcagaggaacggattgaacgcatgcgccgctcaagaagccagtttttgcaaaacggccacagtgtattaagcagacgttaagaaattgatctggaggttatgaaagtgctacatgacgaaaaacgcattctcacaattaatccaggctcaacttcaacgaaaatcggtgtttttcataacgaaagaagcatttttgaaaaaacattgagacacaacatagaagagctgcagcgatttgaccgaattattgatcagtatgaatttcgtaaaaaccatattctcgaaacgcttcatgaacagggaatcaatatctcaaagtttgatgcagtctgcgcaagaggcggccttctccggccaattgaaggcgggacctacgtagtgaatgatgaaatgattgaggatttgaaaagcggttacgccggtcagcatgcttctaatctcgggggcattatcgcgcgggaaatcgcagacggcctgaatatcccttcgtatatcgtcgaccctgttgtcgtagacgaaatgtcagtgcttgcgaaagtttcaggcatgcctgaaattgaacgaaaaagcatttttcacgcattaaatcaaaaagctgtcgctcgtaaagcggcagcctcccttggcaaacgatatgagaacatgaaaatgattattacccatatgggcggaggtattacaattggcgtccatgaccgcgggcgagtggtagatgtcaataacggcctgcacggcgagggaccattcagtcctgaacgagcaggaacagtgcctgcgggagatcttgttgatctatgtttttcaggggaatatacaaaagaagaaatcatgaaaaagcttgttggcaccggcggacttttaggctatctcggtacaaatgatgcagtaaaagtggaacagatgattcaagggggcgatgaaaaagcccgcttcatttatgatgccatggcatatcaggtagcaaaggaaatcggggcagccagcgcggcgttaaaaggcgaagttgaagcgattgtgctgacgggaggccttgcgtacggcaaaagctttgtttctgctatcagatcatacatagattggatttcagacgttttagtctatccgggtgaaaatgaactgcagtctcttgcccaaggggcgctcagagtattgcagggcgaagagcaatccaaacaatatcgtattgaatagacagacaggagtgagtcaccatggcaactgagtatgacgtagtcattctgggcggcggtaccggcggttatgttgcggccatcagagccgctcagctcggcttaaaaacagccgttgtggaaaaggaaaaactcggaggaacatgtctgcataaaggctgtatcccgagtaaagcgctgcttagaagcgcagaggtataccggtcagctcgtgaagccgatcaattcggggtggaaacggctggcgtgtccctcaactttgaaaaagtgcagcagcgtaagcaagccgttgttgataagcttgcagcgggtgtaaatcatttaatgaaaaaaggaaaaattgacgtgtacaccggatatggacgtatccttggaccgtcaatcttctctccgctgccgggaacaatttctgttgagcggggaaatggcgaagaaaatgacatgctgatcccgaaacaagtgatcattgcaacaggatcaagaccgagaatgcttccgggtcttgaagcggacggtaagtctgtactgacttcagatgaggcgctccaaatggaggagctgccacaatcaatcatcattgtcggcggaggggttatcggtatcgaatgggcgtctatgcttcatgattttggtgtgaaggtaacggttattgaatacgcggatcgcatattgccgactgaagatctagagatttcaaaagaaatggaaagtcttcttaagaaaaaaggcatccagttcataacaggggcaaaagtgctgcctgacacaatgacaaaaacatcagatgatatcagcatacaagcggaaaaagacggagaaaccgttacctactctgctgagaaaatgctagtttccatcggcagacaggcaaatatcgaaggcattggcctagagaacaccgatattgttactgaaaatggcatgatttcagtcaatgaaagctgccagacgaaggaatctcatatttatgcaattggagacgtaatcggtggtctgcagttagctcacgttgcttcacatgagggaattattgctgttgagcattttgcaggtctcaatccgcatccgcttgatccgacgcttgtgccgaagtgcatttactcaagccctgaagctgccagtgttggcttaaccgaagacgaagcaaaggcgaacgggcataatgtcaaaatcggcaagttcccatttatggcgattggaaaagcgcttgtatacggtgaaagcgacggttttgtcaaaatcgtggcggaccgagatacagatgatattctcggcgttcatatgatcggcccgcatgtcaccgacatgatttctgaagcgggtcttgccaaagtgctggacgcaacgccgtgggagatcgggcaaacgattcacccgcatccaacgctttctgaagcaattggggaagcagcgcttgccgcagatggcaaagccattcatttttaaaagcataaaggaggggcttgaatgagtacaaaccgacatcaagcactagggctgactgatcaggaagccgttgatatgtatagaaccatgctgttagcaagaaaaatcgatgaaagaatgtggctgttaaaccgttctggcaaaattccatttgtaatttcttgtcaaggacaggaagcagcacaggtaggagcggctttcgcacttgaccgtgaaatggattatgtattgccgtactacagagacatgggtgtcgtgctcgcgtttggcatgacagcaaaggacttaatgatgtccgggtttgcaaaagcagcagatccgaactcaggaggccgccagatgccgggacatttcggacaaaagaaaaaccgcattgtgacgggatcatctccggttacaacgcaagtgccgcacgcagtcggtattgcgcttgcgggacgtatggagaaaaaggatatcgcagcctttgttacatttggggaagggtcttcaaaccaaggcgatttccacgaaggggcaaactttgccgctgtccataagctgccggttattttcatgtgtgaaaacaacaaatacgcaatctcggtgccttacgataagcaagtcgcatgtgagaacatttccgaccgtgccgttggctatgggatgcctggcgtaactgtgaatggaaatgatccgctggaagtttatcaagcggtcaaagaagcacgcgaaagggcacgcagaggagaaggcccgacattaattgaaacgatttcttaccgccttacaccacattccagtgatgacgatgacagcagctacagaggccgtgaagaagtagaggaagcgaaaaaaagtgatcccctgcttacttatcaagcttacttaaaggaaacaggcctgctgtccgatgagatggaacaaaccatgctggatgaaattatggcaatcgtaaatgaagcgacggatgaagcggagaacgccccttatgcagctcctgagtcagcgcttgattatgtgtatgcgaagtagggaggaagaacaaatgtcagtaatgtcatatattgatgcaatcaatttggcgatgaaagaagaaatggaacgagattctcgcgttttcgtccttggggaagatgtaggaagaaaaggcggtgtgtttaaagcgacagcgggactctatgaacaattcggggaagagcgcgttatggatacgccgcttgctgaatctgcgatcgcaggagtcggtatcggagcggcaatgtacggaatgagaccgattgctgaaatgcagtttgctgatttcattatgccggcagtcaaccaaattatttctgaagcggctaaaatccgctaccgcagcaacaatgactggagctgtccgattgtcgtcagagcgccatacggcggaggcgtgcacggagccctgtatcattctcaatcagtcgaagcaattttcgccaaccagcccggactgaaaattgtcatgccatcaacaccatatgacgccaagggtctattaaaagctgcagttcgtgacgaagacccagtgctgttttttgagcacaagcgggcgtaccgtctgataaagggagaggttccggctgatgattatgtcctgccaatcggcaaggcggacgtaaaacgggaaggcgacgacatcacagtgatcacatacggtctgtgtgtccacttcgccttacaagctgcagaacgtctcgaaaaagatggcatttcagcgcatgtggtggatttaagaacagtttacccgcttgataaagaagccatcatcgaagctgcgtccaaaactggaaaggttcttttggtcacagaagatacaaaagaaggcagcatcatgagcgaagtagccgcaattatatccgagcattgtctgttcgacttagacgcgccaatcaaacggcttgcaggtcctgatattccggctatgccttatgcgccgacaatggaaaaatactttatggtcaaccctgataaagtggaagcggcgatgagagaattagcggagttttaaagacgtaagggaggatacaatcatggcaattgaacaaatgacgatgccgcagcttggagaaagcgtaacagaggggacgatcagcaaatggcttgtcgcccccggtgataaagtgaacaaatacgatccaatcgcggaagtcatgacagataaggtaaatgcagaggttccgtcttcttttactggtacgataacagagcttgtgggagaagaaggccaaaccttgcaagtcggagaagtgatttgcaaaattgaaacagaaggcgcgaatccggctgaacaaaaacaagaacagccagctgcttcaaaagccgctgagacgcctgctgcaaaaagtgccgaagcagctgatcagcccaataaaaagcgctactcgccagctgtactccgtttggccggagagcacggcattgacctcgatcaagtaacaggaacaggtgccggcgggcgcatcacacgaaaagatattcagcgcttaattgaaacaggcggcgtacaagaacagaaggctgaggagccgaaaacagcagctcctgcaccgaagtctgcatcaaaacctgagccaaaagaagagacgtcatatcctgcgtctgcagccggtgataaagaaatccctgtcacaggtgtaagaaaagcaattgcttccaatatgaagcgaagcaaaacagaaattccgcatgcttggacgatgatggaagtcgacgtcacaaatatggttgcatatcgcaacagtataaaagattcctttaagaagacagagggctttaatttaacgttcttcgccttttttgtaaaagcggtcgctcaggcgttaaaagaattcccacaaatgaatagcatgtgggcgggggacaaaattattcagaaaaaggatatcaatatttcaattgcagttgccacagaggattctttatttgttccggtgattaaaaacgctgatgaaaaaacaattaaaggcattgcgaaagacattaccggcctagctaaaaaagtaagagacggaaaactcactgcagatgacatgcagggaggcacgtttaccgtcaacaacacaggttcgttcggctctgttcagtcaatgggcattatcaactaccctcaggctgcgattcttcaagtagaatccatcgtcaaacgcccggttgtcatggacaatggcatgattgctgtcagagacatggttaatctgtgtctgtccttagatcacagagtgcttgacggtctcgtgtgcggacgattcttgggacgtgtgaaacaaattttagaatcgattgacgagaagacatctgtttactaaataagcaaaaagagcattttttgaagttttgtttcaaaaaatgctctttttctattattcagcgattcgtattttcatttcgacacgatattcttcttgttttttcggggagtaatgaatcggtatgattaactcgtaaacatcactgacaactgttaattggcggtctgcgatatacttgataagcttctgtaagttgagaaaataatgttcaggcgaaaaattatacgcgatacacgcatacctccctttagggatcgttgtgatttccatatccggcgtaattgatgaaatctgtttattcgtcaatacaggcgtgaaaatatgacggtaagtcatttcatcaatgctggtgtagggctgaaaagagaaagtagcgccgtagctattgttcgtaaatccatctgctgactcgataaatttttttaatttgctgtaggaggcattgagcacgttttcaggcccgattccttctgcctctgtctgaatgatccgtatttcttcttcatctaaaacaaacacctcaccgagcgcgggatattccatctgccgtttcatccgctttttcaccaatgaaatggtttgctccagtgctgataaaaagtctaatttctccctgatttgcctctcctgctctgtataaaaagcaaacagttcttccatctctaagtcctgtgcttttttcatctcctctaaaggtgtgccgatatatttcaatgatttgatcaaatccagatgaatgagctgagaatctgtataatagcggtagctggtatccgggtcgacgtaggcgggtttaaataaatcaattttatcgtaataacggagcgcttttatcgacacgtttgccagttttgatacttccccaattgagtaatacgattccttcatgtcatcactccttctatcatcagtataaagaagaagcgcattctttgcagtacacaaagaatgcgcttcttatcacgtgctggctttaagatgtgcaggcgctttccaagcaatggtcagtgcaatccctatggccaaggtgaccgttgcaaagtagaaaggatagtttacatcaatatcgaacagcattccgccgataataggcccgaatacattgccgatacttgtaaacattgaattcataccgccggcaaacccctgttcatttcccgcaatctttgacaggtaagtcgttaccgcaggccgcatgagatcaaatccgacaaatacggtgactgtaaccagcagaatcgcaacatatgaatggactgttgtcagcaagaataccagactcgtagagagaattaagctgtaccgaattaaatggatttcgccaaaccatcttgtgaagcggtcgaataagacgacttgcgtaatggcgccaacaatcgctcctcctgtaatcataatggcaatgtcgctggccgtaaatccgaatttatgatccacgaataatgcaaataaagattcaaatgatgctaaaccaaaagacgaaattaagataatgagaaaagctatgaaatacatgggggcaaaaatccgtttaaagcctgtcttctgtccttttatttcctgattttcagggtttcgttccggctcgcgcagcgtgaggattgataaaatggctgctaacagtgcaaaagctgccgcaaagaaaaaaggcagccgggaatggacttctgctaaaaatcccccgatgccggggccgataataaatcctgttgaaatagcggctgacatataaccgagcgcttttggcctcgttttaatggtcgtgatatctgcgataaaagccgtgaccccgggcataatgaaggctgcgctgataccgcccagcatacgggagataaataacatctcaactgtttttccaatgccgaacaaaaactccgacacactaaagaacaacaggccgattacgatcatgatcttgcgcccgaagcgatcaacccatcgtccggctattggtgagacaatgagctgtgtaatagcgaagcaggcaaccatatagccgaccgcggtccccgataaatgcaattcattcataatggccggcgttactggaatcacaagcccgatccccaaaaaagcaataaataaattggttaataatatcgttaaggtaatatttttcttctccatatgacttcccctttttcaagtgtgtatcccttatactgtaagacctcctcctaggggagagtcaacggatttgcaaaatctttctaaagctttatgacagttatccatttgcgggaacaagcatgtcgatatgctgcggcaggacctgaatgactgcgggtgtatgtgtataaacttctccatccatatccgcctttttggcagtgtctgtttcaatttcgatacgggaggcctggacataggacagctctccggtaaaacgatcaattgagccctgttccatgctcatcagctcccgcagcgcggtgaggttggtgttgcggcatatgagaacatcaagtaagccgtcttcaatactggcatcgggcagaggaattcgattcgttccaatgtattggccattcatcacaagcagcataacggcttcttctttaatttcttttccgtcaatttttaatgtcatcggaaacgatgcagcggatgagacggttcgcaacgcacttgtaaaatagctgatttttcccaataatgctttttccgtttcgttgatttgattcgacgtttctgcaattaagccgatcccccagaaatttaaaaaataacggtcattcatctgacatacgtctacgctggttttatttcctgccataagtgcttccgcggcctttgcaagattttgagggatgccaagcactcttgaaaagtcattgcacgtgcctccgggcaaaattccgaccgcgggttttctttctagagcgctgatagcatttatgcattgatggatcgtgccgtcgccgccgagaatgaagacggtgtcgacagaatcatcaatggatcggcaaaaatgatacgcatcatcctttttctttgtctgtttaataatcacctcatctaaatggtgagataaaaccggcacgacagcaccaagtgctttttctatatttttgttgccggcatttccgttatgaatcagtaacgctttccggtggctcatatacaactgctcctttattttacttctggttatataatcccctttttctgtaagcagtaaacgaagagcaaaaaaagtgcacggcgaagcaaagtcatttgccgatatggacgtttccttgctatcataagaacagatgatgaaaaaggagaggtcttcattgaatatggactttaatttatttatgaatgatattgtccgccaagcgagacaggaaattacagctgctggatacactgagctgaaaacagctgaagaggtggatgaggcacttacgaaaaaaggaacgacgcttgtcatggtaaactctgtttgcggatgcgccggaggaattgcaagaccggcagcctaccattccgttcactatgataaaagacctgatcagctcgtcaccgtttttgccggacaggataaagaagcgacagcgcgtgcgcgagactattttgaaggttatccgccatcttctccgtcctttgcgattttgaaagacggaaagatcatgaaaatggtagagcgtcatgaaattgaaggccatgagccgatggccgtagtggcaaagctgcaggaagcctttgaagaatattgtgaagaagtataagacgaacaacccggatgctcaaagcagcccgggtttttttgtgcataaatttccaaggatatatgaataaatattaagggattattcaatcggattgtacagcgatttaatttttatctagtaatatcagaagagatcactggaaagataagcttaaagataatttttaaaaatagtattgcataaaaatgagaaactgtttaaaatacaaattaacgaataaatattcaaatacaccaaaagtaatgaatacgggggaaatggatcatgaaaaaatggctcttattacttgtagctgcttgcatcacctttgcattaactgcgtgcggctcaagcaattcaggttcagaaagcggaaagaaaaaattaattatgggtacttcggcggattacaaaccgtttgaatataaagaaggagataatattgtcggctttgatgtagagctggcaaaagctctggcaaagaaggcaggctatgaaattgaagtgcaggatatggacttcaacagcttaattacagcgcttaaatcaaaacaggtggatctcgttctgtcaggaatgacaccaacgcctgagcgtaaaaaacaagttgatttttccgatgtgtattacacagcgaaccatatgattgtcagcaaaaaagacagcggcattcaatctttgaaagacctgaaaggaaaaacagttggcgttcagcttggctctattcaggaagagaaggggaaagagctttctccggaatatggttttaaaacagaagaccgcaacagaatttctgatttggtgcaggaaatcaaatctgaccgtttcgatgccgcgattattgaagacattgttgcagaagggtatttcaaatcaaatgatgacctgcaaggctttgtgattcctgatgcgaaagcggaagaagccggttcagcaattgctttcagaaaggacagtgaactgacagacaaattcaataaagcgctcaaggaaatggaagataacggagagcttgagaaattgaagaaaaaatggttcactggcgagaagtaaaaaaaagcggctcaactttttcgttgagcctttttattgaataggaaacttttttcctgtaagaaaaggagacaaaggctatgaatttggatttttcagcaacgatcccccaaattccttttatattagaaggcttggcaattacattaaaaattgttgttgtatctgctattatcggacttatactcggtattgtgctaagcttatgcaagatcagcacattccgcccgtttatctggatcgctgatttttatacatcagtgttccgaggcacgcctttagtgctgcagcttatgattgtctattttggccttcctcagctgctcggatttcaaattgaccagttttgggctgcggttgtcgcattgtctttgaattccgccgcttatgtatcggaaattatcagagccggaatcaatgccattgataaagggcaaaaagaagctgctgttgcactcggtgtcccgtatggaaaaatgatgaaggatctgctgctgccgcaggccttcaaaaatatatcacctgcaattgtgaatgaattaattacgttaacaaaagaatcggcgatcgtcaccgtcatcgggcttggtgatgtcatgagacgcgcatatcaagctggcgccgccacttacaattaccttgagccgctcattatcgcgggattgatttattatgtgcttgtcctgattttaacgtttatcggcaaggctgtagaaaggaagctgaaatccaatgattaaggttgaaaagctgtcaaaatcatttgggaaacacgaagtattaaaaaacatttcaacaacaatcgctgagggtgaggttgttgccgtgatcggtccttcaggctcaggcaaatcaacgttcttacgctgtttaaacctgttggaaaagcctaacggcggaaccattacaataaaagacacagagattacgaagccaaaaaccaacacattaaaggtccgggaaaacatcgggatggtttttcagcattttcatctctttccgcacaaaacggttctcgaaaacatcatgtacgcgcctgtcaatgtaaaaaaagaatcaaaacaggctgcaaaggagaaagctgaggacctgctccgcaaagtcggtttgtttgaaaagcgaaatgactatccaaaccgtttgtctggcggacaaaaacagcgtgtcgcgattgccagggctcttgcgatgaatccggacattatgctgtttgacgagccgacctccgcccttgatccggagatggtcaaagaagtgctacaggtgatgaaagagctggtcgaaaccggcatgaccatggtgattgtcacacatgaaatgggcttcgcaaaagaagtggcagaccgcgtgctgtttatggaccaaggaatgattgtcgaggacggcaatccgaaggaattttttatgtcgccaaaatccaaaagagcgcaggactttttagagaaaatattatagaatataaaaaagaagaaggctggccgcctcttcttttttattgaagaaacaaatagaaatggagtccgacatgtttaaaattggttatcgcacaataaagaccgcgctaggaacagctttggctatttatataagccagttattgcatttgcaaaacttcgcatcagcaggaatcatcaccattttgtgcatacaaatcacacaaaaacggtcgcttcaggcctcatgggcccgctttgcggcatgttgtctggcaattgttttttcttatctctttttcgagcttattggctaccacccgtttgttatcggagcgcttcttttgatattcattccgataacggttctgttaaaaattaacgaaggtatcgtcaccagttccgttattatccttcatttatacatgtccggcggcattacgcttgctttcatctggaatgaagttcagctgattacggttggcatcggcgtcgctctattgatgaacttgtatatgcctagtcttgaccggaaactgattgcctaccgcaaaaagatagaggataactttgctgtcatttttgcagaaatcgaacggtatttgttaactggtgagcaagattggtcaggaaaagaaattccggaaacgcaccagctcattacggaggctaaaaacctggcatatcgagatgtgcaaaaccacattttgcgttatgaaaatctgcattatcattattttaaaatgagagaaaagcaatttgaaattatcgaacgccttctccctaaagtgacatcgatctccattacggtagatcagggaaaaatgatcgctgaatttattcatgatttgcgggaggcgatacaccctgggaatacagcgtacaaatttctgaaaagacttgctgacatgagaaaagaatttgaggagatgccgcttcctgcgactagagaggaatttgaagcgagggccgctctcttccatcttctcggcgaaatggaacaatatttagtgattaaaagttattttaaaggaataaaagcacaaaaatcactcggatgattcgcatgagctcttccttcattggtcaacctaatgaaaaaggaggagcttatgcgttttttcttatgttcgatttttatgatgatttcaccgatttggccgctcggcgaaaatccgctgccgggtgatccgtatattattgtcaacaagcgaacaaatgaacttgctgttatcctcgacaacagagtagaaggcgtgtatagtgtggcgactggaaaaacagatgatttgacgcctgaaggagagttttcggtaacggtaaaagcggaaaatccttactacagaaagaaaaatattgaagggggatctcctgacaacccgcttggggccagatggatcggatttgacgcgaaaggaacggacgggcggatttatggaattcatgggacaaaccgagaggaatcagtagggaaatttgtgtctaacggctgtatacgtatgcataacgatgaggtcgttcatttgtttcaaacgataccagtaggaacgagagtgctgatcacggacgacaaccgctcttttgaggagattgccatcgagcataaagctctgataaaaaagcaggatattcccattgaataaggcgcctgcttttttatcgttataaaaacatgacgattcctgagagtacagttgaaagaataaaaactcccaaaatcacgatcaaaacgcttttcatcagtttttgagacatgattttcactccttaaacaatctgtctatattttagcgtgttttgaatgggtggacaagcgatatctattagcgaaagcagggatgcaaatgaacaggcttgaccatatcgggatagccgttttttcgataaaagatgctagaagcttttatgaaaatgtattggggcttgcatttctacatcaagaaacggttgaagaacaaaaggtgaatgttgctttttttcaagctggtagcgtcaaacttgagctgatagagccgttgacagctgacagccccgtccgtttatttttggagaagaaagggcagggactgcatcatattgcgtttttgtgcaacggcctatctgaacagcttcaagcattgtctgaccggcatgttcgattgattgacaggtatccaagacagggggcaaatgggaaaaagatcgcgtttatttcccctcgggaaacaaacggtgttcttatagagctttgtgaaccgaaaggagaccaacacaatgagcatgaatgagcacatggatcatttatacacgaaacgcaagcaggcagaagaaggcggaggacgggaaaagctggctcagcagcggcaaaagggcaagctcactgctcgggaaaggatcatatttcttctagatcaggacagctttatcgaattacaccccttcatggaaagtcaagtgttaacaagagaacagcgcatgttaggggatggggtcgtgacagggtacggcacaattgacggccgctcagtttatgtatttgcgcaagacttcacagtgtacggaggggcgcttggcgaaacccatgccaggaaaatctgcgctttgatggatctggcagcaaaaaataaggcgccgattatcgggctgaatgactcaggtggtgcgagaattcaagagggtgtggtatcattagatggatacggtcacatattttaccgaaacgtcttatattccggagtcattccgcaaatatcggttattttagggccgtgcgctggaggcgctgtatattctccggcactcacagattttatatttatggctgaacagaccggccggatgtttattaccggcccgaaggtgattgaaaaagtgacaggggaacaggttgatgcggagagcttaggcggagcggggatacataatgccgtcagcggaaacgcccacttttccgggcatacggagaaggaggttctgacaggggtgagaaaactgctgtcttatttgccgctgaatggccggacaacagagccgaagccagagaaagaggcgtccagaccgttattaaaccgtctagtgcctgctgacacgacaaagccgtatgatgttcggacggtgattaaggagatggccgacccgcagtctttttttgagattcagccattttttgcgaagaacattgtcattgggtttgcaaggctgggtgaaaaagcaatcggcattgtggcgagccagccgaagcatctggcgggaagcctgacgattgacgctgctgataaagcagcaaggttcatccgtttttgtgacgcatttgatatcccgctattgactgtcgaagatgtcccggggtttctgccgggtattcagcaagagcacaatggaatcatcaggcatggagcaaaattattgtttgcttatgctgaagctactgtcccaaaagtcacactcatcattagaaaagcgtacggcggcgcctatgtggccatgaacagcaaagcgatcggagcggaccttgtgtttgcatggccgaatgctgaaatcgcagtgatgggtccagaaggtgcggcatcgattttgtatgaaaaggaaatcaaagcttcagctgacccgcaaaagacgaaacgcgaaaaaacagctgaatacaaaaagcaaaacgccggcccatacaaagcggccgcttgtggaatggtcgatgacatcattttgccggaagaatcaaggggaagactgattcaagcttttcatatgcttgcacataagacagaagagagaccgaaaaaaaagcacggtaacataccgctttaacatggagggacttacaaatggtgaatgaaaaacgcctgctggaagaatttttagagcttgtccaaattgactcagaaacaaagcacgaagctgaaatctgcaaagtgctgaaacgaaaattttctgatttaggtgtggacgttaaagaagacgatacaatggatatcacgggccacggagccggtaacctgatttgcacgctaaaagggacaaaacaaacagatacgatctattttacatctcatatggacacagttgtacccggaaacggcgtaaaaccagttgtagagaacggttacgtcaaaactgacggcacgacgattttaggcgctgatgataaagcgggattggctgcaatgtttgaggcgattaaggtgctgaaagaagaaaacattgaacacggcacgattgaattcatcatcacagtaggggaagaatcgggtctgatcggagcgaaggctcttgaccgttctatgatcactgcatcctacggctatgcccttgattcagacggaaaagttggaaatatcattgtggccgcgccgacacaggcgaaggtaagagcggcaattttcgggaaaaccgctcacgccggggttgaacctgaaaaaggcatttcagcgattacaatcgctagcaaagccatttcaaaaatgccattgggccgtatcgatgaagaaacaacagctaatatcggccggtttgaaggcggcacacaaacaaacattgtgtgcgacgaagttcatattcttgctgaagcgcgctctttagttcctgagaaaatggaagctcaggttcaaaaaatgaaagctgcttttgaagaggcagctgctgatatgggcggacgcgcagaagtcgaaattgaggttatgtatccgggctttaaatatcaagacggcgaccaagttgttgaaatcgcgaaaaaagcggctgctaaaatcggacgtccaagcgagctgcaaacgagcggcggcggaagcgacgcgaacgtaatcgctggtcatggcatcccgacggtcaatcttgctgtcggttatgagcaaattcatacaaaaaatgaaaaaatgccgatcgaagagctcgttaaaacggcagaaatggttgttgccattattgaagaggcggcaaaataaaaaaagaaaacccgagtgcgatttcccgcatcgggtttttttagctccatttcctaagcggccaaaataacacatcctgttttttagcgtaatgaagcaaggggtctgactccggcaatgtaatgccgtgagcatcagtcaccgtattgactgaaatttctgcttcggcgttttgcagcagccacggatgatgatggatgtcttcgtaatagagtttgctttgattggtagtatagagtctataccgttctgtcagccagtaatcgagcgaatccttttctgctgtaaaaggcgctgaaatgggccgatatgcggcgtggaatgctgcttctttgtcatctttccgcttgctgacatagtcaatggcatcaccgtttttttcggctttcatatccgcgtaaaaataaggcagatgaaagaatgtgcgagcgccaaggaccgccagacgatgatcggcatctaagctaaaaaaataaatgccgggcttacctttatacgtgacataggtgcggaggttaagctcaggaaatgcacgcgcaccgggaatggcaggaagataacgcgccctcaggttcgtgagcataaagggaagcatgctgatccaagcttgcccgttatatgtatctaattctaaaacggacggtaccaaagcgcgaaggatagaaacatcaacaggccagtgagcaaataagacatcattccaggtttgtctcatgatccagattccttcaggtacagaaatgtttttttgctgaaagtgttccgtcaacgtatatgctcctttcgtttggagatgagtaaaggtattccctatttccttctttttaaacgatacggctattttttggatggccatttctgcttcagccatgataaacaagactgtttggcgcggtatgctttgcaagtaacaaaaaacaaccccggcttttcgcacggggttgcttttttatttcaccgactcagtaagagcggctgtttttttacttttatgatgcgtcatctgaaggacgatgttttgcactgttaaaaacagtccgcttgtaaaccagtacagcggaagggctgccggaacattaagcgagaaaatcgtcatcatcacagggaagatgaacaccatcaattttgtggattgctgcgccgcagggttttgcgggacagcggaatatttcgcgctcagtttttgagcgatataggcctggataaagtacattgctcccgcactaagagacacgagaatatctgattgtcctaaactgaaccataaaaacgagtgtgacgcaatttcaggtgtagagcgaatcgcgtaataaaacccaatcacaataggaaactgaatcagcattgggaggcatcccatagcaagcggattgatgttgttctcttgatacagcttcatcatttccatttgcagttctttttgcttttcagggtccttcgtttttttcaatttggcctgaatgctgtcaacctgaggtttaataacggccattttctcttggaagatgcgctgttttttgaactgattaacaaacaaaggcagtacaaccatacgcacaataatggttacgaggataatagagagtccgtattctccgtgaaacagcccggcaacacccttaagcagagcggaaaacggttcgattaaataatcgtggaaaaaccctacgttgctgaggcctcccacctgattagtcgctgcaaatgcagcattgcccgagcataatacgatcaaaaagatacccatagccaaaagtttttgatatgtttttaacaattttgttctcctcctttttataaatgcggtttataaaagaagagaaccggcgtcttcctcatcgttcacaggcgaattcatgcggaagactttacgtatccaagttgtaatgcgatgatatataataataagaaagtatgttcggttaatgtgaaagaccgtctgatgttcatctgttcgttttgatttccattgctcgcccgcacggcactctcgtaagaggaatgcaatcccgattgccgtcagagcaggaagaataattgtgaaaaaatcgactaagaataaaacgtcatttatcgattccacaaacattttaatcacatccattcagtaccttcattttactatatgtacaagccgttgtctaatgaacgaaaaggagatttatgtatgtcgggaaagggccgaattattttccatattgatatgaatagcttttacgcatcggtggaaatggcatatgatccggcccttcgggggaagccggtcgcagttgccggaaacgtaaaggagcgaaagggcattgtggtgacatgcagctacgaagcaagggcgcgcggcgtcaaaacaacgatgccggtttggcaagcgaagcgccattgtccagagctcatcgttcttccgccgaattttgaccgctatagaaactcttcacgagcgatgtttaccattcttcgtgaatatactgacctagtggagcctgtctccatcgatgagggctatatggacatgaccgatacaccatacagcagccgggctctagagacggcaaaagaaatccaaagcagattgcaaaaagagctgctgcttccgtcaagcataggaatcgcgccgaataaatttctcgctaagatggcgtctgatatgaaaaaaccgcttggaattacgatcttaagaaagaggcaagtgcctgatatcctgtggccgcttcctgttggagagatgcacggagtcggcaaaaagacagcggaaaaactgaagggactcggcatccatacaatcggagagctagctgcagctgatgaacactcgctgaagcgcctgcttggcatcaacggtccgcgccttaaaaataaagcaaatggcattcaccatgcgccggttgacccggagcgcatttacgaatttaaaagcgtcggcaactcatcgacactttcccatgattccagtgatgaagaagagctgttaggcgtctttagaaagcttgccgcttctgtgagtgaccgtttacagcgcaaggaagtcatggcttcgaagctttttatcatgattagatatgcggattggaaaaccatcacgagaagcaccacgctgagaaacccgattgatcaaaaaaatgacattttgaaagaagcggagcacctcttttttaaacattggaataaaaatcctgtcaggctgcttggcattaccggaacggatttagtagaaaaagagcaggcctataaacagctcgatttgttcagctttaatgaagatgcgaaggatgagcccattcagcagatgatggaaaagctgaataaaaagtacggtaccaaactgatcagaaaaggggcaacgttaaaaaaagaggagagcaaaacaaagggaacaagctttaataaagatttttttcaagatgaaaagaaaagctgaatcgcttgaaaaaaagggtgaatgtatggtaatttctttattataaatatcattttattttaatttaaattttaaaatgattaaacgtttgcagaagggacgttagaatatgtcaaaacaacaaatcggcgttatcggacttgcggtcatgggtaaaaatctggctttaaatatcgaaagccggggattttctgtttctgtttacaacagatcaagcagtaaaactgaggagtttttacaggaggcaaaaggaaaaaatgttgttggcacttacagcattgaagaatttgtccaatccttggaaacaccgcgcaaaatcttattaatggttaaagcgggaactgcaacagatgcgacaattcaatctcttcttcctcatctagagaaggatgatattttaattgacggcggtaatacatactataaagatacacagcgccgtaacaaagaactcgctgaaagcggcattcattttatcggaacaggcgtttccggcggagaagaaggggcacttaaaggaccttctatcatgcctggcggacaaaaagaagcacatgagcttgtaaaaccgattcttgaagccatttctgcaaaagttgacggagaaccttgtacgacatatatcggtccggacggcgccggccattacgtaaaaatggtgcacaacggaattgaatacggagatatgcagctgatctctgaatcatatttcattctgaaacaggtgctgggcctttctgctgatgagcttcacgaagttttcgctgaatggaataaaggtgagcttgacagctacttgattgagattacagctgacatctttacgaaaaaagacgaagaaacaggcaaaccgcttgttgatgtgattcttgataaagcaggccaaaaaggaacaggaaaatggacaagccaaagcgcacttgacttaggtgttccgcttccgattattactgaatctgtattcgcgcgctttatctcagctatgaaggaagagcgtgtgaaagcgagcggccttctttcaggaccagaagtgaagcctgttacagaaaataaagaagagctgattgaagcggtcagaaaagcgttgttcatgagtaaaatctgctcgtacgcgcaaggatttgcccaaatgaaagctgcttctgaagaatacaactgggatctgaaatatggtgaaatcgctatgatcttccgcggtggctgcatcattcgcgcggcattccttcagaagatcaaagaagcttacgatcgcgagcctgagcttgacaacctgcttcttgacagctatttcaagaatattgtagaaagctaccaaggagcgcttcgccaagtgatttcacttgcagttgcccagggtgtgccggtgccatcattctcaagcgcattagcctactatgacagctaccgcacagccgtactgcctgcaaacttaatccaagcacagcgcgactactttggcgctcatacgtatgagcgtactgacaaagaaggcatcttccatactgaatggatgaagtaatcaatagaaacccccgaagctcttaagctttgggggttttgttattaaagagattgttcagcgtaaaaaagccgaaaatgcttgtaaacattttcggcttttttcttcttattatatattccaccagtgtaagccgtctttcgccaaaagatcatcagattctttcggtcccatggagcctgattcgtagttaggagataaggttttgtttgctgcccatgtttcagaaatagagtcgacaaagctccaagaaagggcaacttcatcccagtgtgcaaagtttgttgcatcgccaagaagacagtcgtgaattagtttttcatatgcttcaggggtgttcaactcgtcattgcaattgctgcaataatcgagtttgattggctgtgcgtgtgctgctccgccaagctttttagcatttaagtaaagcgtaatgccttcgtcaggctgaatatgaatgacaagcaagttcggattcatgttgttttcattaccgtagtacaggttcatcggaatgtccttaaattgaacgacaatttttgtggacttttctttcattcgttttccggttctgatgtagaatggaacaccagcccatctgaagttgtcgatcaagagcttgccggcaacaaaggtttctgtattggagtcaggagcgacattatcttcatctgtataagcaggaaccggtacaccgtcaatttcaccagcttgatattgtccgcgcacaaagtattcatccacttcctcttttgcaataggacgcagtgctctcagcaccttcactttttcgctgcggatttcttctgtgttcaatttgataggcggctccattgcaagaagggcaaccatctgcataatatggttttgcaccatgtcgcgaagggcgcctgatttttcgtaatatcttgcgcggtcttcaacgcctagtgattcgctagatgtgatttgaatgtttgaaatgtagcggtttgtccaaagcggttcgaaaatcgcattggcaaatcgaatcacttcaatgttctgaaccatttgtttgcctagataatggtcgattctgtaaatttgatcttccgtaaatgcttcgcggatttctttattcaatgcctgtgcgcttggcagatcatggccgaacggtttttcgatgacaaggcgggaccagccggttgtagctgttacaccctctgattttaatgtttttgcaatcgttccgaagaattcaggagccattgccaagtagaacattctgttgttaggaatttgatatgtatcttccagctggttaagcaatacgtttagctcttgataagaaccagggtttgtcacgtcaaacgggtgatagtaaaaatgagacgtgaaatcatctatatgcttatctgcagatgaggaaatggatgttttaaccgtttggcgaagatcctcattagaccacggtcttcttccaactcctaccactgcaaactcttctccgatttgtccgttttgatatagacggtgaatagacggatacaattttcgttttgctaaatctccagttgcaccgaatatgacaattactgcttttggttgttggtttgttttcactaaaagtacctcactttattcgaagctttattttagtacaccccgtatatttccttcattttaaatctaaaattcaacgaaagcaaacatttaagcccttttttaagcagaatgctgaaaaaatgtttctagcacgaaaggattgttcttttcagaggcaagattcacattttgagcttgatcctgtattcttgtaggtatctggttctagtaggaggaaggaaacgtggaattactttttttagggacgggagccggcattcccgccaaggcgagaaacgtcacctctgtagcattgaaattgcttgaagaaaggcgttcggtatggctttttgactgcggggaagccacacagcatcaaattttacatacaacgattaaacctcgtaaaatagagaaaatctttattacacacatgcacggcgatcatgtatacggacttccggggcttctggggagccgttcctttcaaggcggagaggacgagctgacagtgtacggacctaaagggatcaaggcgtttattgaaacaagccttgccgtcacgaagacccatttgacatatccgcttgcggtccaggaaattgaagaaggaatcgtgtttgaggacgatcagtttattgtcacagcggtatctgttattcatggagtggaagccttcgggtaccgtgtgcaggaaaaagacgtaccgggttccttgaaggctgatgtattaaaagaaatgaacatcccgcccggacctgtatatcagaaaatcaaaaaaggcgaaacggtaacgcttgaagacggacgaatcatcaatgggaatgattttctggagcctcctaaaaagggaagatctgttgtgttctccggtgatacgagagtaagtgacaaactaaaagagcttgcgagggattgtgatgtgcttgttcatgaagcaacctttgctaaggaagaccgtaaacttgcttatgattattatcacagtacaacggaacaagcggctgtaacagcgaaagaagcaagagcgaagcagctcattttaacccatatcagcgcaagatatcagggagatgcttctttggagcttcaaaaagaagcggttgacgttttccccaatagcgtggcggcatatgatttcttagaggtaaacgtcccgcgaggctgaaggcggagctcttatttgacaatttgtgatgatgttgtataataaaacgtaatcattacgttttataaggaggtgttaaatatgagagtaaatgttactttagcctgcactgaaacgggagaccgaaattacatcacaacaaaaaataaacgcaccaatccagaccgtttggagctgaaaaaatattcaccgcgtttaaagaaatatacccttcaccgtgaaacaaaataatataaaagaccgggaatcccttacggcccggtctttttttacgttaattgactgcctggtaaagaggagcggcctgctggcacgctgcgcaccatacgtcataaatagccaagtgaacgatatgaggttcatcatgatggatgttgtgggagctgtttttagcttgaatccagccgctttggttagatagagacaatatgctgctgtgcaagttttgccactcctgttcagcagcgaatttctcagtccgttctcctgatgacaacacaagaagaggcatgtttcctaagtggacttgccgctttttgagctcctgcagactttttgaaaactctgcatgtgtgccctcaagcatcatctttctcgtatgtgatttgtgcatttcttcgggtataaaggtaaagctggcgcaatcgcctaaagctgggtcaagaaggaccatgccgataatatcatacttgtttttgcaggcccataaaccggtgatgacagctccgtatgagtgtgaaacagccaaataaggaggttttacatcagctgctttaagcaaactctccaattctttcacttgttgatcagctgttcgtttagctctgctttgcccgctttttcctatgcctgcccgatcatatgtgaaaatgccaaattcatcatcaatgtccgccattaatggtttccacgtctcagaagaagtaccatagccggcctcaaagacaatcgttacaccgcttgatcctttccggtgctgtgtatgaaacgcacatccgtcaattgtatatgtcttttccatccaagctgatttcattggagtcatctcctctaattggttctactagggagacggagaaccttagccgatcgtttctctaaaaataaaaaaagagatatcctctacaggatatctcttatgggcattaccagcctctttcgtattgaacaggggccggaatctctgtgttgagctgtttcgcagcagttcttgcaaagaatggatcccgcaaaagctctctgccgataaagatgaggtcggcacgtccgttttgcagaatttcttcagccattgaaccgtctgtaatcatgccgacggcaccagtagccatgtccgcctgttcacggattttctcagcgaagctgacctgatagccagggaatacgttaatgtctgcgtgtacaagggcgcctgagctgcagtcaattaagtcaacaccctgctccttcatccattttgcaaaaccgatgtgatcggcaatgtctaagcctttatcagtgtagtcagaagcagatacacggacaaataaaggtccgtcccatacttgtttgacttcatcaatgatctctctcaagaaacgatagcggttttcaggtgagccgccgtattcatctgtgcgatggttggaaagcggagacaaaaattcatgaattaaatatccgtgcgccgcatgaatttcaatcacatcaaagccggcttcttttgcgcgggcagccgcttgcttgaactcctgaactgtttcttttactttttctgctgacatttctacaggtgttgctgattgttcgtcaaacgcaatcgccgatggagcgaagatatctccttcaagctcagctttacgtccggcatgggcaagctgaatgccgatttttgaaccttgttctttgacctgctcagtcagtttggcaaagccttcaatatgctcgtcgctccaaatgcctaagtcttggtctgtgattcgtccttgagggttaaccgctgacgcctctacaataatcagtccgacctggccgattgcgcgcgatatgtaatgtgccatgtggaacggtgtcaattttccgtccttttcatgagaagaatacatgcacattggcgacatgacaatgcggttttttaacgtcatatctttaattgtaataggtgtaaataattttctggccatttctttcgcctcccgtaaggtttttagagattgattatatcaagtcatttctttcccgtcatataaactgctcaaaagaaccgcttttgtcaaacatttctgtataatagacgagaaatcagtttatttttcagtatagaagcatttttattcataggaggggcggaatcaatgaattggcagacgaaggacgaattgctggcacttttaacttctcttgtgcaatacgaaagcatcaccggttcaaagggcgaggcagcacttgcagagtatctttattttattttgaaggacaagccctattttcaaaatcaccctgatgatgtaacacttcatccgatggacgatggcagatcttttcttacggctctagtcaaaaagaagaatgtcaaaaagacagtgcttctgctgagtcattttgatgtcgttgacatagaagattacggcgaatttaaacatatggcttgcaagcctgctgagcttttgagctcctttttagagaaaaaagagctgctcccggaacgggtgagaagagatgccgaaagcggagactggctgttcggaagagggacgatggatatgaaagcggggctttgtgttcaactgtcgatgctggagagggcaatgaacggacattttgagggcaatctgctgttgataacggttccggacgaggaagtgaattcaagaggcatgattgaagcggttcctgcattgaaggaaatggagaaaaagcatgatatcacattaactgcttgcctgaatgccgaaccgatgtttgaaaaatttcccggcgatcagcagcaatatttttatactggaagcattggcaaggtgcttgcgggttttttctgcaaggggattgagacacatgttggagagccgttttcaggcctaaacgcaaatttaatggtatctgagattaaccgtttgcttgaactgaatgctgattattgcgaaaaggttgatggcgaggtcactccgccgccggtaaacttaatgcaaaaggacttgaaagaggcatattcagtccagacaccgcatacagccgtcacattatttaatgtgctgtcaatgaaacgctcagctagtgagctgcatcagatgctgcttaaaacagcagaacaggcggcggaggaaatcatgtcgaacgttcggaagaaaacacaggattttcaacaatttgagccatttcagccgattgagcgggacgtcactgttttgacatttgatgagctggtctcgcgtgcaaaaaagcgtgcggggatctcggaaacagagcgggctctaaattatgcctttgctaacaggggggagcttggagacagggatttttcgacgaaaattgtttctgagcttgcttcgctttgtaaggaggatgcgccgctcatcgttctgttttatagtccgccgctttatccagctgtttcttcaaaggatgatcaattgatcagaaatacagcagatcagttaaagcattatgcggctgagcgatacggcattgcattacgggaagttcagtacttccctggactttcggacttgagttatcttcagctggaaaagcaggaggttgatgcatacacaagcaatatgccgctctttaacagaggatattcattgccaagcggtaaaaatcaggctttatatgtcccggttttaaatgtcggtccggctggtaaagacccgcataaatggacggaaagattgtatatgccttattcctttgaagtgcttcccgatttgctttcatttacgatctccgcgctattaaagcaatcagaatctgccggccagctgctgcgggaaaaataaaaaacagaaggcactgtgccttctgtttttgtccttacatctaagaatgtctctctaaggcggcaccggcaaactgttctttgatttctgcgctccgtttagctgtttcttcaatacagtgaataattgcttcttcaaagcgggagtcctgtaaagcgcgaagacctgcctctgtagtgcccccaggactggtgatttctttacgcagcttttccggctgtttgccgctttggaggagcatatctgttgcccctgccattgtctgcaaaatgagtgcttttgccgtttctttatctaatcctactttttgtgctgctttttccatcgcctcaatataacgatacacataggccgggccgctgcctgcgattgcagtgacagcgtcaagatgccgctcctcaaccagtgttgcatcaccgattgtttccaatagagcttttgcggcaataatatcattcttgcttgcttccgtgcttacggaaaatccggttgctgattttctgattgccgctgatgtattaggcatgacgcgaatgaccgcgagctttctgccaaaataatgctgaatggtttcgatggtaaggcctgcaagtactgaaattacaagctgatccttgatatacggccggatgctgtcgatgctttccgccgcgtctttcggtttgaaagcgaggataatgatatcggtgtgagtgaaaaactcatttttatctctgcatggacgcacgccgtacgtttcctttaattcaatcagacgctcgtcatttgagcgatttgtaatatagatgtgttctggttttgtgatgccgctttgcaaaatgccgttgatcattgcttctgccattgacccggcgccgacaaatcctatctttttcattgatatcctccttctatcagaacaacaaaaaaccttttcatcacgtaaaggacgaaaaggttcgcggtaccaccctcattagcacaaattgtgctcagctcaaatcccgtaacgcgggaaacgtttaggttttcctaaccgcgacttgagggcaggttctacaaacaagcgggccgcaacacctttcagccgggggtatcgctctcttaggccattgccttgtatactattcctcgtcatagcgttctaatggttctcgttttagtttgttgttcattatgcaatggcggacaagctgatgtcaatagctttttcaaaaaggtttgttctcattcagcaataatgacacaagaccgagaaaaagctaaaatatgaataatgaatgaagacaaggagcgaatggatgacaactgaagatgtaattgcgatccgcgtcccgacgccgtttgctgtcggtgatgttatcgtttacctcgtaaaaggtgatgcactgacacttattgatgcagggccgaatacaaaagaggctgccagagccttacaagagcagcttgccgctgtaaatgtgaaattgtcagatatcgagcaggttgtactgactcaccatcatgctgatcatgcaggcttgcttgatgtcttttcagatgaaatcgaagtgattgggcatgcattcaacgaaccttatatcagccgaaatcaagcctttatggattggcaaaaacgtttttttcaaaagctgctgcctgaattaggcgttccatttgatacggggaaggcggaaaagctgatgcgatcagcgtacgcattttcctgtacgagatctctgacaaaatcaatcagagaaggtatgggcatagatgggcttgagggctggtctgtgttggagatgcctggacatgctgaatcgcatatcgttctgttccatgaaaaaagcggaaggatgcttggcggcgatctactgctggccaacagctcgtctaatccgattttggaagcgccgaaagcgggagacgtcaggtcaaagcctttagtggattatcagcggtcattgcgaaggctgtctcaacttgatccaacaatcgtatttcctggtcacggcgagcctatcaccagtgtacaagcgctgattgagaagcgttttgacaagcagaggaacaggacggaggatgtgcgtcgcatgctggatgaaaagccgatgaccgcttttcaggtctgtcagcagctttttcctgctgtatatgaaaaggaattgtttttaacgatgtcagaaacggcaggtcaccttgatgtgttggaggctgaagaagccatcacgtcatattgggaaggaaataccgcatactttaaaacaatgaagaggtgaaatgggtgaaacatatagcgggaaaaaggatttggataaccggcgcttcaggagggcttggtgaaagaatcgcatacttatgcgcggctgaaggagcccatgtcctgctgtcggctagacgcgaggatcgtttgatagaaatcaaaaggaaaataaccgaggaatggagcggacagtgtgagatttttcctctggatgtcggccgcctagaggatattgcccgggtccgcgatcagatcggctcggttgatgtactgattaacaatgcgggcttcggtatatttgaaacggttttagactctacattggatgacatgaaagcgatgtttgatgtgaatgtcttcggcctgatcgcctgtacaaaagcggtgcttccgcaaatgcttgagcaaaaaaagggacatatcatcaatatcgcctctcaagcggggaaaatcgcaacaccgaagtctagcctgtattccgctaccaaacatgccgtgttaggttactcaaacgctttgcggatggagctttcgggaaccggcatttatgtgacaacagtcaacccgggaccgattcagacggactttttttccattgctgataaaggcggggactacgccaaaaatgtcggccgctggatgcttgatcctgatgacgtagcagctcaaattacagctgcaatttttacgaaaaagcgggagatcaatcttccgcgtttaatgaatgccggcactaagctgtatcagctgtttccagctcttgtagaaaagctggcaggacgcgcgttcatgaaaaaataatgatggaactgcctgtggtggagtggcttgtttctcacgaggcagtttttgatagtggaagggagagattgttgaatgtcagttcattcagaagtccttcatgctctgcttaaagatccgtttatacagaaactgattgatgcagagcctgtattctgggcaaattcaggcaagaaagaggggccattaccccgtgcagatgagtgggcaaccgagatagcggaagcggaaaaaagaatgcggcggtttgcaccttacattgccgaggtgtttcctgagacgaaaggcgctaaaggaatcatcgaatctccgctttttgaggttcagcatatgaaggaaaagctggaagcggcatatcagcagccatttccgggaagatggcttttaaagtgcgaccatgagcttccgatttcaggatcgattaaagcgaggggcgggatttatgaagtgttaaagcatgctgaaaatctcgcgcttcaagaaggaatgcttcaggaaaccgatgattaccgcatcttacaggaagagcggtttaccgggtttttctcccgctattcgattgctgtcggttcgacaggaaatctgggtttaagcatcggcatcatcggcgcggcactcggctttcgcgtgacagtgcatatgtccgccgatgctaagcagtggaaaaaggatctcctccgccaaaagggagtcactgttatggagtacgaaacagattacagcgaagcggtgaacgaggggagacggcaggcggaacaagatccattctgttattttattgatgatgaacattctcgtcagctgttcttaggatatgctgttgccgcaagccgattaaaaacacagcttgactgtatgaatatacagccaagtcttgagacgcccttgtttgtgtatctgccgtgcggagtcggcggaggaccgggcggtgtagcatttgggctgaagcttctatacggagatgatgttcatgtgtttttcgcagaaccaactcattcaccttgtatgctgttagggctttattcaggacttcacgagaagatctccgtccaggatatcggcctggataatcagactgctgctgacggacttgccgtagggaggccgtcaggatttgtcggcaagctgattgaaccgcttctgagcggctgttatacggtagaggacaatacgctttatactttgcttcatatgctggctgtatctgaagataaatatttagagccctctgctcttgccggcatgttcgggccggttcagcttttttcgacagaagagggaaggcgctatggtcagaaatataagatggaacatgccgtacatgtcgtctggggaacgggaggaagcatggttccaaaagatgaaatggctgcgtataaccgaattggtgctgatttgctaaaaaaacgaaatgaaaaataagcagacagtgaaaaggttttccgttacaatctttgtaagggttttaacctacagagagtcaggtgtaaacagtgaaaaataaagaacttaacctacatactttatatacacagcacaatcgggcgtcttggtctggttttggggggcatttgtcgattgctgtatctgaagaagaggcaaaagctgtggaaggattgaatgattatctatctgttgaagaagtggaaacgatctatattccgcttgttcgcttgcttcatttacatgtcaagtctgcggctgaacgcaataagcatgtcaatgtttttttgaagcacccacattcagccaaaattccgtttattatcggcattgccggcagtgtcgcagtcggaaaaagcacgacggcgcggatcttgcagaagctgctttcgcgtttgcctgaccgtccaaaagtgagccttatcacgacagatggttttttatttcctactgccgagctgaaaaagaaaaatatgatgtctagaaaagggtttcctgaaagctatgatgtaaaggcgctgctcgaatttttgaatgacttaaaatcaggaaaggacagcgtaaaggccccggtgtattcccatctaacctatgaccgcgaggaaggtgtgttcgaggttgtagaacaggcggatattgtgattattgaaggcattaatgtgcttcagtcgcccaccttggaggatgaccgggaaaacccgcgtatttttgtttccgatttctttgatttttcgatttatgtggatgcggaggaaagccggattttcacttggtatttagagcgttttcgcctgcttcgggaaactgcttttcaaaatcctgattcatattttcataaatttaaagacttgtccgatcaggaggctgacgagatggcagcctcgatttgggagagtgtcaaccggccgaatttatatgaaaatattttgccgactaaattcaggtcagatctcattttgcgtaagggagacgggcataaggtcgaggaagtgctggtaaggagggtatgaaattgtgcatcatatcgaactgtatgtctctgatttggaggcgtctaggcggttttggggatggttcttaaaagaacttggctataaagagtatcaaaaatggagctcaggcatcagctggaagaaagatcgtttttacctagtgattgtgcaggcgaaagagccatttctagagccggaataccatagatgccgagtcggtctgaaccatctcgcatttcatgctgaatccaagcttcaagtcgatcagatgactgaaaaattgacggcaaaaggttatcgtgtgttgtaccgagagaggcatccttttgccggaggagacgggcattatgcagtctattgtgaggatccggaccggattaaggtagagctcgttgccccaagctgttaatcgtgatcttcggacaggctgttcagctttttctcaatgcgatccagctgcgcttttcggtttttcgcatacttgaagcctgtaacagccgcaaagatgacagcggcaaatataataaatacaaacagctgaaacatcacatcacctatattcatgttcttcacctcatgtttgcgggagagtttcattctcttccgttttttatttaaagcggcttttccagacgggaacggtgttttgtggtctccattttcatttgccgataggcgaacgctaaaaatggcaggccgagcagggtaatgccgctcaggacagaaaaaatataaatcggccggccagcgctaaacaggtctatacatatccccccgatccaagggccgatgacgtttccgagctgtgaaaaaccgattgccccgaaataagtgccttttaatcctggttttgcaatctggtctacatacaaatccatcatagagaataaaagaacttcgccgattgtaaatgtgatgacaatcatcacaattgatggaacaccgtgcgatacggtgaaaatggccatgctgatgctaaccatcacattaccgagcatcagagaacaaagcggcgaaaaccgttttgcaaaatggacaatgggaaattgcgtcgccaacactacgattgcgtttaatgtcagcatcagcccgtacagcttcgttccattgccgatcaaggggttctgcgccatatactgagggaatgtggaactaaattgtgagtagccgaaggtgcatagcgtaatgccgaccaaagcaatggtaaaaagataatccttttgcgtgaccataaacgcttcccgcacgctcatatttcgggactgggctggtgctgataaggatggatgttttttaaattggagggcaagcacaattccgtataggccgtaaatgactgcaggcaccaaaaagggcgtagtcgattgcgatgagccgaaatataggccaagcacaggtccgaagacaacaccgatattaatagctgcatagcgtaaattaaaaactagcagtctcgttttttcttctgtcatatcagacagcaaggcctttgaagcgggctcaaacagtgatttgcaaagaccgtttaatgcgttaactacaaaaaacacccagagatgagatgccgccgcaaagcctgcaaataccagcatccatccgaaaatcgatacaagcatcatgttttttctgccgaatttatctgagatatatccgccgtaaaagcttgcgaggatgccgactgatgagctcgcggcaatgaccagccctgcataggaagctgatgcgccttggacggctgtcaaataaatcgctaaaaaaggaatgctcatcgatgttgccattctgccgaaaatggttccgattataattgtccagctgatcgggtggatatctttccatttcttcatgaattatattctctcctgtatgtatgatctttctctatcatatatgaaaaaatttccttctccaatagatcgttcaaaatatttcgttattgacatgtagtatgcctgattgtatggatggcaatatactatgcgttgaggatgcgtgtggctgacggagtttacatcttgaaagaaggaaaatgactggatgtccgatgaaaagcaaagcgattggtcagtgagagtgtctgtttgaaacaataaaggagtttaagccgccaggatgcggatcatatcggcagcaaaaccggatatgagatcgctgaaaaccgtcatgccgcatgacagaagagagagcgcatctcttcggttgaatcaaggatggtaatcgcgtaatcgtggacagcttattccattttgcgggagcgctgtcgtatgactttgagactgtttatttgttatcaggcgtgttttcaaagggaagctgcatcagcggctgaaagaactgacagtcatgcgtttaagagaacaagccttggtttgtgacatagtcataaatgatatcttctatatgcgcatgcaaatcctcatccggttcttcattccgtctctcttgtagagccgctttcaggctttgtttttcatacgggcttaacggatctatagcaacgtttctgccgtattgccgcaatgcctgttccatcattttttcgacaaatttctccatcatgactctcctatccttatgcttcgcttttattctactaaatgtttttcttctctcaaacccttggatcatattttctgtcagacaagaatcatttaccagtataaaacgaacatactttcgcatataatgaaaaacgaacataagttctttttagaggtgtgtatgatgaaagaaaaagtgatttttctcgttgacatgcaatcgttttatgcatctgtagagaaagcggaaaatccacatttgaaaaataggcccgtcattgtttcgggtgaccctgaaaaaaggggcggagtcgtattggctgcctgcccgctggcgaaacaaaagggtgtggtgaatgcttcacggctgtgggaggcgcaggaaaagtgtcctgaggctgttgtgctccggccgcgtatgcagcggtatattgatgtatcactgcaaattacggccattctcgaggagtatacagaccttgtggagccttattctatcgatgaacagttcatggacattacaggcagccagaagctgtttgggacgccgatggagatcgcgaaaagcattcagggcagaatcatgcgggagatcggcgtttatgcacgggtcggaatcggccctaacaaagcgctggccaaaattgcgtgtgacaattttgccaaaaagaataagaacggtatttttaccttaacgaaagaaaatatgaaaaccgaaatgtggccgctcccggtgggcagcatgtttggcgtcgggagccgcatgaagcatcatttaaatcggatgggcatcagcacgatcggcgggctcgcggcttttccgctcgatcttttaaaaaagaaatggggcattaacggccacgtgctgtggatgacggcaaacggaatcgactattcccctgtgtcaacttcgtctctggacgggcaaaaggcgataggccatggaatgactctcccgagagactacgaacactttgacaaagaaatcaaggtcgtattgcttgagctgagtgaagaagtgtgcaggcgaagccgaaacgccggggtcatggggcagacggtgtcagtgagctgccggggtgctgattttgattggccgacgggcttcaaccggcaagtgaagctggcagagccgactaattctactcaggatgtatatgaggctgtacgccggctgtttcttacattttgggacgggaaacctgtccgccgcctcggtgtcaatctgtctcagctctcatctgatgacatatggcagctcaatttatttcaggattatgcaaagaaaatgagcctaggctatgtgatggacggcattaaaaatcgattcggcgacacagcaatcatcagggcggcgtcactgacagcggcaggccaggcatttgaacgtgcggctaaaataggggggcattataaatgaacgatcatttaaaaaggggcaacctgctgtgggaagggagcaggatgtttctgccggaacataagcaaagcctgctggagagaaagcggcttaaacagaagctgcaaaagccgatccttgaccccgataagctggaagagatgaatcaaacgctttgcgccgcgatggagttcgctcaggatatcactgtcagctgctttcaggacggtgagattgtccgctgcaccgggaagatctgccggtatgaagagtttgaaaaagcagtatggataaaaggagacgaggatcagctttataagctgagacttgatcaagtgcttgatattgtgctgtaaagtctctcctcctgcttgggggagaaataggctaaaatgatgaaacattgttccctcggcagtctggaaacgtatgataaaggaaagaaggcatttacaattccagccaggcaaaatataatttttatattgtgagaaaaagagctgacattcgttttgccagacggagggagatcaaatcgtaatggatattcgaacaatcacgtcttcagattatgaaatggtaacgtctgtactgaatgaatggtggggcggcagacagctgaaagaaaaattgccgagactattttttgagcattttcaggacacaagctttattacatccgaacataacagcatgacgggatttttaatcggatttcaatcgcaatcggatcctgaaacggcgtacattcatttttccggtgtgcatccagatttcagaaaaatgcaaattgggaaacaattgtatgatgtatttatcgaaacagtaaaacaaagaggctgcacccgggtaaagtgcgtcacttcacctgtgaataaggtatcaatcgcatatcacacaaaattggggtttgatattgaaaagggcaccaagacggtaaatggcatctcagtgtttgcaaactatgatggcccaggccaagacagggtactgtttgtcaaaaacatatgagggggaaatatgatgaattttttatcaaaaacacctgagcctccttactatgcagtcattttttcttctgtcaaaagcgaaaatgacacaggatatggagaaacagcggagcggatggtatcgcttgcggcggatcagcctggatttttaggcgtggaaagcgtacgtgaagcggatggaaggggcatcacagtttcctattgggacagtatggacgcaattaaccattggaggcatcacactgaacatcaagcagcaaaagaaaaaggaaaaagcgtttggtacgagtcgtatgcagtccgcgtcgcaaaagtcgaaagacagcggctgtttcaggaggaacacgaatgattgaatttatccagcataaggaagacactatagcgcgtgagattttagccgtacagatccccgcctacataaaggaaacagagattattggttttgacggtattcccgctttacaagagaaggtgaaggatattcaagcatcccatgaacggtttgcgggatatcggaaaaacggcaagctgatcggtgtcatttcatatgagaaaaacatgcatcatctcaccatttgcaggcttgttgtgcatcctgacggtttcagaaaaggaattggacgagcgcttctgcaatttgtcattgatcataatgaagacgctgagaaaatcgaagtagtcacagccgagaacaataccccggccgtgtcactctatacacaggctggattccaaaaggcagaaaccgtcaaagcagcgcagggtctattgctgtcggtctttcatttgtatccgaaaagaaaagttgaggtcattctctacaacgaaaaatgggcagaatgtttcgatgaagaaaaagaacggctgaaacttgtgttcgggccggagattatcgctgttcatcacatcggaagcacatcaataccgaacatggcagcgaagccaatcattgatatgttaattgaagtcagaagcattgaagccgtgagccaatttgatgaacaaatgaaggctaacggctatacaccaaaaggtgagaacggcatagcgggcaggcgttatttccaaaagggcggaaataaacgcactcatcatgtccatatgtacgaacagggaaaccctgctattgaaaggcatctgttattcagagattatctcagagctcatccaaacatagcgaaagaatacgccgttctcaaaaaacggctggcggcccagcatcctgacagcatcaatcagtacatacaagggaaagatgagtggatcaagactgcagaagaaaatgcgaagcggtggaaaaaaggcagaaacaatgcgaatggcagtgttgtatgctacaatagcgaaaatgatgaaaacgggggtttcaccttatgaacatacatgtgacagatgcagcaaaacaggcactgcagcaggcgtttgacgccaacccggggaaaaaagcccagcttcgttacgatgcagaaggatgcggctgcgctgtaagcggtgtcccgacaatctggctggcagaagaattaacgggacagtgcgagcagctggaaacgaacggcattccgctgtatatccaatcgtcgcaaaaagtgttttttgacgatcaaatgacgatcgattacaatgaaaaagccaaaacattggcgctgaaaagtccggctgaaatgctcagccccagaatgagcatattagtaaagtaggagacgcgaaacgtggaacaaaagctgaaggcaatgaagaacacagcacaaaataaaacgtgggtatccttcctgaatcaaaaccatccctataccttgcttcactggtcaatcggaggagcagagtccatcaagaaagatgtctggctattgcaggatgaaatgaccttcgagacgcaggagtttacaacgatagatcttgcgattgaatggatcagagaaaatatggatggcattaccgacgttctgtaacataaaaaagcgaaagagccgaagaggcctttcgcttttttattctgtttaatcattcatgttgtctaaaaactcctgcactgtttttcggtacgtatcccgatttttggtatatgacatggcgtgttcaccgttctcggcaatgtacagcgctttcggcccgcgtttcttttcataaagccgctcggtcgaagaaacaggaatgtagtcatcatccttactgtgaataaagaggaccggcttttcgattttatcaatgacagcaagcggagatacttcgcgtgcgcgatagccgcccctcagcttcaaaaagaagtcggcgatagggagcaggggccaagacgggagcctgtattccgctctcagccggtaggcaagctgttcatcaaaacatgcgaacggacaatcagcaatataaaaatcagcgccatcgctgcagtgtgcaccagcataaagcagggcggtcacagctcccatcgactcaccgtgaattccgatcaatccgcgatgatttgttttgtttttgagccagctgacaaccttattgagatcatctttttcgtaaaacccgtagctggtcgtctttccgccgctttggccatgccggcgatggtcataaatgagcacattccagccgagatctagaaataaatgcatatacttaagagaattcagtacattcatcgtcaccccgtggcagatgatgatggtatttggtgtgtcatgcggtgcgacatggtatccttttatgtcgtacccgtaagcggagggtatcacaaaagcggttttctccatttgttcaaatgattcaaacacatcatgtccgttgtctgtctctcttttgataatgtcttcatccgtttttttcttgatgaatagaatcatatttgaaaaaacaattccgattgcgatgacagctgttacgagagcgccaatggccaaaaggattttcttcaaaagtcacagcacctttcaactaaatataggtaattcgtgtttgaaatcattatacctaaacactgctccgctgagaaagtgaccagaagagagtctgcttgttcagtgtatatgctccgtgataaactgtcttcaaaacaaaacatgggggaagtctgaatgaaaaaacaaaaatccgctgacaaacaccagctaaaagacggccttcaatccgatatcaaagcaaagcttatggagatgaagagccaattgaaggaagaggatgaaaagaggcaggaaagagaaaaagcagaacagatcagaaagaaaaaagagatcgaaaaaaataagagctttgaagaactcctaaatgaaagccaaatggattggcatcaatataaataaaccagcacctgtacgggtgctggtttttctgctatgagcgatgagctttgtaaatgtcttgtttcgtatgagattggagcgctttgatttcctcctcggttaaacgccgtgcatttgctgcctgaatattttcccgtaactgctcaatcttactggcgcctgtaatcactgaagcgacagccggctgtgctagcagatactgcagcgacttttctgtcatggaaagatcgggagccacttcctccattgccttgcgggcatttgtcagttcctcgaatgaataggacaagtacccgttttgtttcatactgtctgaagcttgatcaagcggtttttcagttaagagccctttggcaacaggacctctggcgactacgctgatttgatgttcctctaaaagcgggagccattcctcagggcgtctgtcaaacaggctgaattgcatcataatgctgacgatgtttgatttttttacatattctttaatcacattcgggcggatggaagaaatgccgtagtagcggatgacaccttcttgttttaattcctcaaacgcttcgatcgtttcatcaatgttgtcctctatcgtgccgccgtgaagctgataaaggtcgatataatctgttttcagacgtgtaaggctcttttttaccgcctcttttatgtaaacttttgaagggtcccaataccagccctcgcttccgtcatcccaacggtttcccgcttttgttgccagtataatatcctggcgtctgttttggatcgcatcaccgacaatttcttcgttgcgtccccggtcatacaaatccgctgtatccaaatagttgatgccaagctcgatcgcttcatccaaaatggacaaagcttggtttttttcagttccaagagacatacagccgagtccgacttcactaatgtctaaatcagatgtacccaatttgcgctttttcatgtgcacactccttttttaggctttgtattgaccgtaatataaaggagctaaagtttcaacttttatggctttgagatccaatctttcacatattgaaatgtgcgtccatactcttttaacttcgcccgaatttcccatgcttttccgactaagacaacaccttttggcatgcggtgcactttcacgaagaagcccccttttgctctagtatgataaaatgtatggggcatcatatagagacagaacgggagatgaagaaatgaaatcattagaagaaaaaacaattgccaaagaacagatcttttcgggtaaagtcattgatctttatgtcgaggatgtagagctgccaaacggaaaggccagtaaacgtgaaattgtgaaacaccctggagctgtagcggtactagccgtcacagatgaagggaaaatcatcatggtcaaacaattccgtaagccgcttgagcggacgatcgttgaaattccggccggtaagcttgaaaaaggtgaggagccggagtatacggcacttcgggaacttgaagaggaaaccggttatacagcaaaaaaactgacaaaaataactgcgttttatacatcacccggatttgcagatgaaattgttcacgtttttcttgctgaggagctttctgtgcttgaagaaaaacgggagcttgatgaggacgagtttgttgaagtgatggaggtgacgcttgaagatgcgctaaagctggttgaatcgcgtgaagtatatgatgctaaaacagcctacgcgattcagtatcttcaactgaaagaagcgctccaagcacaaaaatgaaaaagatttacgcggatttgcacattcatatcggccggacttttacaggaagggctgtcaaaataacaggcgccaaaacattaacgctggacagaattttggttgaagccagtgaacataaaggaattgaactcctcggcattatcgactgtcattctccggaagtcattctagagcttgaggaaggcatttcatctggaaaatatcgcgagcttgacgggggaggaatccgttatcgcagcacgactcttttattggggagcgagctggagatttatgatgaagcctgtagcggaccgatccatgtgctcgtatttatgccgacgctggctgatatgaaacagttttcaaactggctgtcagcccggctgaaaaatattcatttaagctcgcagcggatttatgaaacgggcttaaacctgcaaaaaaaagtgcaggatatgggcggcttgtttatccccgcccatatctttacgccgcataaaagcttatatggaaaaggggttaaatcaagcttaactgaggtttttgatccatctatgatagacgcggtggagcttggattaagctgtgatacagacatggcatcacaggtatctgaattgaatccgtatccttttttaacaaattctgatgcgcattcgttggggaaaatcggcagagaatataatgaactatatgtgcagtcagctgattttactgaatttgctcttgcattaaagggacaagatgacaggaaaattatcgcaaattatggcttggacccgttattggggaaatattatcagactgcttgcgaagcgtgcggagagcctgctgtaagcggggaaacagcgtgcgtgaattgcggaaatgccagatttaccaagggagtcagcgaaagattgcgtgaattgagtgatcagcttgaagttcgcgtcccgcgtccgcgatatgtacatcagatcccgctgcaatttgttccgggtgtaggcccgaaaacgctggacaaactaaaaaaagccttcggaacagaaatggctgttcttcatgaggctgcagaagaagatttggctcgcgttgtcccgccgaaaaccgcggcgcttatcgtaaaagcgagatccggaaaactggaattgaaagccggaggaggaggaacctacggtaaaattaaaccgtgagctaaagattaactcagttcctcctgtacttttctttttgtgcgtataaaggtaatcagctggatgatttcatcttcactcagcggctggccatcaacagaaatggtaaagtcaaggctgctccacgtggccaattctatggcctgaggagcagtctgcttttgtttctcgcggcctaaaagttcatcgcaggttgtgtcaaagaggtcagccagcatggcaagcgcttcaagtgaaggccgtcggtagcctgactcgtagccggcatatgtgctttttgcgataccgagaaggtcagctgtatattgaagcgaccaatttttcttttttctcaattcagttaaacgatctagattcatgaacttccgctcctttttcaccttgagctgattatatcatataggtattaggaagtgtacgcgaattgaataataatgtcttgcgtattttattttccgtgtctataattgcattaaaagtatgcgaaaagcgaataccttctcgcaacccatctttagatacagtgaagaggtgcatggtatgaaaaaattattgatgttgacaactgggggaacgattgcttcagttgaaggggaaaatgggctggctcccggagtcaaggctgatgaattattaagttacgtatcaaaacttgataacgattacacaatggaaactcagtcgcttatgaatatagacagcaccaatatgcagcctgaatactgggtggaaatagcggaagccgttaaggaaaattatgatgcctatgacgggtttgttattactcacggtacagatacaatggcctatacatctgcagcactatcgtatatgctgcagcatgccaaaaagccgattgtcatcaccggctcgcagattccgatcacgttccaaaaaaccgatgccaaaaaaaatattactgatgccattcgatttgcctgtgaaggcgtgggcggcgtttatgttgtatttgacggcagagtcattcagggaacgcgtgcgatcaaattaagaacgaaaagctacgacgcatttgaaagcatcaattacccatatatcgcttttatcaatgaagacgggatcgaatacaacaaacaagtaacggaacctgagaacgacaccttcacagttgacacttcactatgcacagatgtatgtctgctgaagctgcatccaggcttaaagcctgaaatgtttgatgccctgaaaagcatgtacaaaggaattgtcattgagagttatggcagcggaggggtgccgtttgaaggcagggacattttgtcaaaagtgaatgagctgatcgaaagcggcattgtcgtcgtcattacgactcaatgtcttgaagaaggcgaagacatgagcatttacgaggttggccgcagagtcaaccaagacttaattatccgatcaagaaatatgaacacagaagcaattgtgccaaaattgatgtgggcgctaggtcagtcttcggatcttcctgtcgtcaagagaattatggaaacgccgatagctgatgacgttgtcctgtaaaatgtaaaaacgataaccagcaaagagaaagaaggttaaagattatgttaaacggccaaaaagaatatcgcgtggaaaaagacttccttggggaaaaacaaattgaggcagatgtttattacggaattcagacgctccgtgcttctgaaaatttcccgatcacaggatacaaaatccatgaggaaatgattaacgcattggcgattgtgaaaaaagctgcggctcttgccaacatggacgtgaaacggctgtatgaaggaattggccaagctatcgtacaagccgctgacgagattctggaaggcaagtggcacgatcagtttatcgtcgatccgattcagggcggtgccggaacttctatgaacatgaacgcgaatgaggttatcggaaaccgggcgcttgaaatcatgggacataaaaagggagattatatccatttaagtccaaacacacatgtgaacatgtcacagtctacgaacgatgtgttcccgactgctattcatatttccacattgaagctcttagaaaaactgctgaaaacaatggaagatatgcatagtgtgtttaagcaaaaagcacaggagtttgactctgttattaaaatgggccggacacaccttcaagatgcggttccgatccgtcttggccaggaattcgaagcttacagccgtgttctcgagcgtgatatcaaacgaatcaagcaatcgcgccagcacctgtatgaagtcaacatgggcgcaactgctgttggtacagggctgaacgctgatcctgaatatatcaaacaggtagtaaagcaccttgctgatattagcgggcttcctcttgtcggcgctgaccatcttgttgatgcgacacaaaatacagatgcctatacagaggtatcagcttcattaaaagtctgcatgatgaacatgtcgaagatcgcaaacgacctgcgcttaatggcgtcgggaccgcgcgccggacttgcggaaatttctctgcctgcacgtcagccgggttcatctattatgccggggaaagtcaacccggttatggcggagctgatcaaccaaattgcgttccaggttatcggaaacgacaatacaatctgccttgcttcagaagccggccagcttgagttgaacgtcatggagcccgtgcttgtctttaatttgcttcaatccatcagcatcatgaacaacggcttccgttcgttcactgacaactgcttaaaaggcattgaagccaacgaaaagcgtatgaagcaatacgtagaaaaaagcgcaggcgtgatcacagctgtcaatccgcatcttggatatgaagcggctgccagaattgcccgggaagcgattatgacaggccaatcagtccgtgacctttgcctgcagcatgatgtgctgacagaagaagaattggatattattttaaatccatatgaaatgacaaaaccagggattgcaggaaaagaactcttagaaaaataaaatttgaacaaaatgcagcttattcatctccgaataatcggatgaataagctgtttacaacatagggatgaggaagtatagtatacgtgttgcactatttattgaaagcgttttagctttttacatgaagggggacttcttatgaaggatgtaagactgccaacactattcgaaattattattgtactaggatcatttttagcacttgtcatgtcgtttacagtctttttagacttgccgatacagctcgcgctcttcatttcctggtttattgcaatgattctcggaatcagactcggttattcttataaagatatgcaaaatgcgattctgcatggaatatcaaacggtcttgaagctgttctgattctcgtttcagttggggcgctcattggaacatggatcgccggaggcgttgtgccgacactgatttattacggattagaatttattcaccctagtatttttttactagcaacattgattatttgttcaatcatgtctgtggcaacaggaacatcatggggaacagtcggaactgccggcatcgccatgatcgcaattggagaaggattagggattccgcttcctcttgtagcgggagctatcctttcaggcgcatattttggggacaagctttctcctctgtctgacagtacagttttggcttcctcactatcaaaagtcgatgtattggaccacgtgagagcaatgctttatttatcaatacctgcatatgtgattacggctattttatttactattaccggctttatgtacggcgggaaaaatattgatcttgataaagttgaatttttgaaatcatctttgcaaaatacgtttgatattcatatttggatgctgattccggctgttgtcgtcattgtcttattagcgatgaaaaagccgtcgatgccggttatcgttatcggagctttgcttggcgcaatctgggctgctgtgttccagggcatgaatattgcggatgcgattgccactgcgtacaacggattttctattaaaacagatgttgaatttttgaacggcttgttaaaccgcggcggaattgtcggaatgctcagttcccttgtcgtgattatatttggtcttggttttggaggcctgcttgagaaactcggcgtgctgaaagtcatcgtctctatgtttgaaaagaaattaacatctgccggcaatgtcactttatctacactgatcgtagcgtttttagcgaacatcttcggctgtgcgatgtatgtatctcttattttgactccgaaaattatggaagacagctatgatcgcttgcatctggacagaagagtgttatcacgtaactcagaggtcgggggaacattgacttcggggatggtaccttggtctgataatgggatttacatggctggtattttaggtgtttctaccttctcttatctgccgtttatgtggctcagttttgtagcaataggtcttgcaattatctatggttatacaggaaaatttatatggtatacgaaaaacaatacagttaaagccgaaaaactaggctaataggggaggatcactgaatgatagcgaaacacatgattcggacactgatgatcgaaacgccttcggttcccggaaatcttggaagggtggctacggccatcggccttctgggcggggatattggtgaagtggagacggtaaaagtcggacccaattacacaatgcggaatattaccgttcaagtggagaatgaagaacagcttcaggaagtgatcgcggctgtacaggccctcggagaagggatcaggcttcacaccgtatctgatgaagtcctgtccgcacatgaaggcggaaaaatccaaatgaaaagcaaaatgccgatccgttcactggcagagctgggacgtgtctacacaccaggtgttgcggacgtgtgccgactgatcgaaaaagaacctgaaaaagcttctatttatacaacgatcagcaattctgttgcaattgtaacggatggaaccgcaattttaggccttgggaatatcggctctgtggctggcatgcctgtcatggaaggaaaggctgctttgtttgatcagctggcgggtattagcggcattccgatactgcttgatacgagtgatcctgaagaaatcatcaaaacagtaaaacatatttctccgggctttagcggcatccttcttgaggatatcggttcgccgcattgttttgaaatcgaggatcgcctaaaagaggagctgaacatccctgttatgcacgatgaccagcatggtacagctgtagtgacgctggcagctgccatttcggcatgcaggagtgcgggggttgacctgaaggaagcgaaagtggggcaaatcggccttggtgcagcaggcgtggccatctgccggatgttcatggcttatggtgtgaatgctgtgtacggaacagataaatcagagtcagcaatgaaccgtctcgaacaatacggcggacaggcagtttccagtattgaggagctcatggaaacatgtgatattgtcattgctacaacgggcgttccgggtttaataaaacctgcatttgtacgttctggtcaagtgattttggctttatcgaatccgaagccggaaattgagccggaggccgcactgcaggctggcgccgcatatgcagctgacgggcgttctgttaataatgtactcggttttccggggatttttagaggagcgcttaacgcaaaaagcacggagattaatcatgatatgcttgtcgcagcagcagaggccatcgcagcttgcactaaacaaggtgatgttgtccctcagccgcttgattcaaaagtccatcatgcggtagcagcagctgtcgagcatgcagctcttacagcagtgaaataaatgtagctaaacagcacctgtcgtagcaggtgctgtttttttcttattattgttcaattttgttatcattactatgaaaaaaaagggagtgatcacatggcaaaaagccaagcgaaaaagaagcgggagcatcgattgagaaacggcggacgtgccgtcttattatcaagaggcagcacaccatctttcagcacacatgaaagaatgacaaaaagcaaaaaagagattttgaataaacggaagcataagaatccttatgatcatacagcagttgatgataaggatttttttgtgccccaaaaagccgcctagcactcatctctatcgtttctttttgaaaaagggcatgtttttctgtttctttcatacaatctattaaatcaaatcactagagcgggcgggaggaaacggtatgcgaaaaatctcttataaggacatgtttctcaggcatgtcaaagatcatctctctctttatatatttgtgtcagtgctgtttttcatgggtgtcatctttggcgcgattattgtcaacagtatgaccatcagccagaaagaagatttatactactacttaagtcaattttttggacagctttcggatggaaaacaggcaagttcagctgatatgtttgggcaaagtatctttcataatgcaaagtatttaggcctgatgtggatactcggaatttccgtcattgggatgccgattattttcattatgatctttctgaaagggatcgtcgtcggctttactgtcgggttcctagtcaatcagatgggagtaagcgggtttttcctatcatttgtctccgttttgccgcaaaatgtgctgctgattccggcttatctcattatgggcacatgtgcaattgcgttttctttaaagttaatcagacagctgttcgtgaaacgaagcctgcatgacgcgccgattcaatggttcgggcggtatgcctttgtgctgctggtcattctgtttttagcgctgatctcatctctgtttgaagcatacttatctcctgttttaatggaaaagcttacatctagacttttttaaaatcattattaaaagaaaaccattttatttatcagtttataataattatagttggaactctgcgcgtattttgttataatgagtcatggaatgcggcgtaggagggaaagacatggaaaaccgtattgatcgtattaagaaacaactgcactcatccagctataaacttacgccacagcgtgaagcgacagtaagagtgctgcttgaaaacgaagaagaccatttaagcgcagaagatgtatacctcctcgtaaaagagaaatctcctgagatcggtctcgctacagtataccgtacgcttgaattattaactgaattaaaagtcgtagataaaattaactttggagacggtgtgtcccgttacgaccttcggaaagagggagcagctcactttcatcaccacttggtgtgcatggagtgcggagccgttgatgaaattgaagaagatttgcttgaagacgtggaagaaatcattgaacgtgattggaaatttaagattaaagatcatagattgacgtttcacggcatttgccaccgctgtaacggaaaagaaactgaatagacggtgccgagcgcgaaccttttctcatggggaaagggttttttgctgtttctatgtataaaacctttctgatttggcatatggtttatataactggaaccatagggaaaggatcgattaggacatgggaagattcctgaaaacagctgtcgatgcattgaaagttttcatcctgtttaccggttttaccgctttgttctattatgctatgatatgggtgaatcaagagtatgaaaactatcatcggtatgataaaccggaaggctccgctgtaaaagttgttgaaatggatcaggatgaaaaaggcggatggttcgaccggttgatctttttttaccaaaacggggagtagatcaagagtgaaagatcaaataaaggatttcatccactacgtcatggtagagagagggctctctcaaaatacgatcgtatcctatgaacgtgacttgaaaagctattctctctacttaacagaaacccttcatgttacagattggaatcacgttacccgcatacatattatccaatacttaaagcatttgaaggactcggggaaatccggcaagacatcggcgcggcatttggcatccattcgctcttttcatcaatttttgctcagggaaaaagtaacggataaggacccttccgttcatatcgaaacacaaaagacggaacgggcgcttccgaaggtgctcgcgctcaatgaagtcgagcggttattggacacgcctaagctgacgagccctttcggatatcgggataaagcaatgctggagctgctttatgcgacaggcatacgagtcagtgaaatgattgaattgaaaacggctgatgttcatttatctatggggtttatccgatgcttcggcaaaggaagaaaagaacggattgtgccaattggtgaagccgccgcttccgccattgaggaatatatgacaaaagccaggggaaaactgttaaagaacaatgtgtctgacgccctctttttaaatcatcacggcaaacagatcagccgccagggattttggaagaacctgaaaaaaatcgcgttggaagccggcattaagaaagagctgactccgcatacgctcaggcattcctttgcgacgcatctgcttgagaacggggcagatttaagagcggtgcaggaaatgctcggtcatgcggatatatccacgacgcaaatttatacgcatgtgacgaaaacaaggctgaaggatgtgtacaagcagtttcatccgcgagcatagccgcaggtggctgcggcttttttgtttagagcgacagaaaatattgaagtttctcattatttccaaatacattgtcaacaggaatgaaaacggtttatacttgagttgtcagacctcttagcgatacaatagacgtatagaaaaaaaggaggctttcaagatgcctgcatacaaatataatcgtgtgtttttaattgtgatggactcagtcggaatcggcgaagcgccggatgccgctgactttaatgacgaaggcgctcatacgctcggtcatattgccgagcatatgaacggattacatatgccgaatatggcaaagctcggccttggtcttatcgaagatatcaaaggtgtagaaaaaacagaacatccgcttgcctactatggaaaaatgcaagaagcgtcaaacggaaaagatacgatgaccggccattgggagattatgggtttatacattgataaaccatttaaagtgttcccggaaggctttcctgatgaattgcttcaagagctggaaaagagatctggccgcaaaattattggaaacaagccggcttccggcacagcgattttggatgagcttggtcaggagcacatggagacaggggctttaattgtttacacgtctgctgactctgttctgcaaattgccgctcacgaagaggttgtgccgcttgaggagctgtatcgcatttgcgaaacggcgagagagctgacgcttgatccgaaatatatggttggccgcattattgcacggccgttcgtcggagagccgggtcaattcaaacggacgccaaaccgccatgactatgcccttaaaccgtttgatcgcactgtcatgaatgaattgaaagacagcggcttagatgtgatttcaatcggtaaaatctctgatatttacgacggagaaggcattacttcttcacgcagaacggtttccaatatggacggaatggacaaggtgatcgatacgctgggagaagactttacgggtctgagctttgcgaaccttgttgattttgacgcgttattcggacaccgccgtgaccctgaaggctacggacgcgcgcttgaagaatttgatgcgcggcttccggaagtgtttgaaaaaatgagagaagacgatctgttaattattacagccgaccatggcaatgatccgattcatcatgggactgaccatacacgcgagtatgtgccgattctcgcttacagcaaaaaacataagaaagcgcaaatgctgccgcttgcagatacatttgctgatatcggcgcaacgatcgctgataatttccaaacgaataaaccgaaatacgggaaaagctttttatctttattacaatagggggactgtttcttgaaggacagaattgaacgcgcagcagcttttattaaacaaaacctgccggaatctccgaagatcggccttattttaggctcaggtcttggcattttggctgacgaaatcgaaaatccggtcaagctgaaatatgaagatatacctgaattcccggtatctactgttgaagggcatgccggacagcttgtgcttggcactcttgaaggagtttccgtcattgcaatgcagggccgctttcatttttatgaaggctactcaatggagaaagtcacattccctgtacgcgtgatgaaagcgctcggtgtggaagcgttgatcgtgacaaatgccgcaggcggtgtcaacactgaattccgtgcgggagacttaatgattattaccgatcatatcaactttatgggaacaaacccgttaatcgggccaaacgaagcagatttcggcgccagatttccagatatgtcttcagcctatgacaaagatctgtccagcctggctgaaaagattgcgaaagaccttaatatcccaattcaaaaaggcgtgtacactgctgtgacaggaccttcttacgaaacaccggcagaagtccgtttcttaagaacgatgggctctgatgctgtcggcatgtctactgttccggaagtcattgtggcgaatcatgcgggaatgcgggttcttggcatttcctgcatctctaacgcggcagccggaattctggatcagcctttaagtcacgatgaagtgatggaagtgaccgaaaaagtaaaagctggattcttaaagcttgttaaagcgatcgtcgctcagtacgaataaaaatgaatcaatgcaggaccaaaagacagctgtgtctgatatcacacagctgtcttttttatgcccaaaattcgaaacattttccatcagtggcgtataaaaccatcccgcttggaaaaaataaaaaggattatgaaatggagggcttttgagatgaaacgtcttttatccactttgttgattggtataatgctgcttacatttgcaccgtctgcatttgcaaaacaagacggaaaacgtacatcggagcttgctcatgaagcgaagtctgcggtgctgatagaacgtgacacgggaaaagtgctttacaacaagaacagcaatgagagactggcgcctgcaagcatgacgaaaattatgacgatgcttttgattatggaagctttagataaaggcaaaatcaaaatgagtgataaggtccgtacaagcgagcatgcggcgtcaatgggcggctcacagatattccttgagcccggcgaagaaatgactgtcaaagaaatgctgaaaggcatcgcaatcgcttcgggaaatgacgcttccgtcgccatggctgaatttatttccggctctgaagaagaatttgtgaagaaaatgaataaaaaagcaaaagagctgggattgaaaaatacatcctttaaaaacccaacaggactgaccgaggaaggacactacagctctgcttatgacatggcaatcatggctaaggaattattgaaatacgaatcaattacgaagtttaccggcacgtatgaagattatctgcgtgaaaatacagataaaaagttttggcttgtaaatacaaatcgccttatcaaattttatcctggtgtagacggcgtaaaaacaggctatacaggcgaagcgaaatattgtctgactgcttcggctaaaaaaggaaacatgcgggccatagcggttgtattcggagcgagcacgcctaaagaaagaaacgcgcaagtgacaaaaatgcttgacttcgcctttagccaatatgaaacgcatcctttatataaacgaaatcaaacagtagcaaaagtaaaggtcaaaaaagggaaacaaaaattgatcgaactcactacatctgagccgatttcaatattgacgaaaaaaggcgaggatatgaacgatgtgaaaaaagaaatcaagatgaaggacaatattagtgctccgattcaaaaaggccaagagcttggcactcttgttctgaaaaaggatggagaagtactcgctgaaagtcctgttgctgcaaaagaagatatgaagaaagccgggtttatcacattcttgaagcggacgatgggagactggacaaaatttaagtaattatgccgaatgaccactagttttgtcacggtgaaggaattcattccgtcgaaatcgaaacactcattatccgatcatatcaaggaggaatgagcatgagccttggaattgacatgcatgtcaaagaatctgtgctttgtattcgattaacaggcgaactcgatcaccatacggctgaaaccctgaaacaaaaagtgactcaatcattggagaaggatgatattcgccatatcgtgctgaacttggaggacctttcctttatggacagctcggggcttggcgttattttaggaagatacaagcaaattaagcaaattggcggggaaatggtcgtttgcgctatctctcctgcggtgaagcgattgtttgatatgtcgggtctgtttaaaattatccgatttgaacaatctgaacagcaggcactcctgacactgggggtggcatcatgaaaaatgaaatgcaccttgagttttctgccctcagtcagaatgaatcgttcgcccgtgtgacagttgcttcatttatagctcagctggacccgacaatggatgaactgactgaaatcaaaacagtcgtgtcagaggctgtcacaaatgcaattatccatggatatgaagagaactgtgaagggaaagtttacatttcagtgacgctggaagatcatgtcgtatatatgaccattcgtgatgaaggcttaggcattacagatcttgaagaagcccgtcagcctctatttacgactaagcctgagcttgagcgctctggaatgggctttaccattatggaaaatttcatggatgatgtcagtatcgattcatcgcctgaaatgggaacaacgattcgcttaacaaagcacttatcaaaaagcaaagcgctttgtaattaaggagatttgttatggatgtggaggttaagaaaaacggcaaaaacgctcagctgaaggatcatgaagtaaaggaattaatcaaacaaagccaaaatggcgaccagcaggcaagagacctcctcatagaaaaaaacatgcgtcttgtttggtctgtcgtacagcggtttttaaacagaggatatgagcctgacgatctcttccagatcggctgcatcgggctgttaaaatctgttgacaaatttgatttaacctatgatgtgcgtttttcaacgtatgcagtgccgatgattatcggagaaatccaacgatttatccgtgatgacggaaccgtaaaggtatcacggtcattaaaagagcttggaaacaaaatccggcgcgcaaaggatgagctttcgaaaacactgggcagagtgccgacggtgcaggagatcgctgaccatttggagattgaagctgaggatgttgtactggcccaagaggcggtaagggctccatcttcgattcacgaaaccgtttatgaaaatgacggagacccgattaccctgctcgatcaaatcgctgacaactcagaagaaaaatggtttgacaaaattgcgctgaaagaagcgatcagcgatttggaggaaagggaaaaactaatcgtctatctcagatattataaagaccagacacagtccgaggtggctgagcggctcgggatctctcaggttcaggtttccaggcttgaaaagaaaatattaaaacagatcaaggttcaaatggatcatacggatggctagtctgcagtgcaggctagcttttttgtgtgcaaaagcgtggtaatttatggtcttttcgagcggatgaatgagaacaaaatcgaaccacatactacatatataaccaccgaaagatggtgatcaatgatggaacgacgaatatttatccggcttcgccaccgggtgctggcacatccaggggatattattaccgttggagatgccgcgcaaatagaagggcagcttcagctgaaaaagaaactttcggctatgccgctttatcaggtgagcgaaaaagataaaaatatcgtaattctggatatcatacaagtcctcagagccattcatttacaagatccgacacttgatgttcaaaccgtaggcggagcagaaaccattgttgaaattcagtatcgaaagcgaaatttatcaacggttctatttatcggtgtctggctgcttctgtttattggatcgtgtcttgccatcatgaactttcatgaggatgtaagcatgagagatgttcatatcgcactatatgaaatcataaccggagagaggaatgactatccatatttgcttcaaatcccatacagcatcggtttgggactggggatgatcgtgttttttaaccacatatttaaaaagcgcctaaatgaagagcccagcccgctggaggttgagatgtttaactatcagcttgatctcgatcaatatgtggccatgcatgagaatcaagaaaccataaaggatctgcatgatcgttagtgtattgttcatcatttttgtcgggctcggcggaggcataacggtgggggcgggtttcgttgcttttttaaccgtaatgggaatcattccgcggctgatgcagctcaccaaaacaatgagatttgttcaggcttatgaagcggctgttattcttggcgcggtttgcgggggatgggagacgcttcatatgaatcatctttatctaacaaaatggatagctgtgccggtcgggcttctggcaggtttgttcgtcgggatgctagcggctgctcttacagaggttttaaatgtcctgccgattttggcgaaacgaatcgggctcagaagtaaaatcattattctgttaatggccatcgtgattgggaaaatcgcgggatctttatttcactggctgtactttattgaccattcataaggaggtttcaagatgacaaacataaaagaaaattacaaatcaaaagtgaaaacatatcagcctaagccgccttacgtctggaactgtgtaaaagcctttttagtgggcggactgatttgtgcaatcgggcaaggtctgcaaaatttttatatccatttttttgatttcaatgaaaaaactgcggggaatccaacagctgcaacgctgatattaatttctgccctacttacagggtttggaatctatgacagaatcggacaattcgcaggcgcaggttcagccgtacctgtcacgggttttgccaacagtatggcaagtgcggctcttgaatataaaagcgaaggattagtgcttggagtagcgacaaatatgtttaaactggcaggaaatgttattgttttcggagttgtagctgcatacatcgttggaatgattcggtttgcttttgagaaactgatgtcataggaggagaagaaaatgaaattaacaggaaagcaaacctgggtatttgaacatcccatatttgtcaactcagcgggaacggcagcaggaccaaaggaaaaagacggaccgcttggctctttatttgataaaacctatgacgaaatgcattgtaatcaaaaaagctgggaaatggcggaacggcagctgatggaagacgctgttaatgttgcacttcaaaaaaacaatctgacaaaagatgatattgacctattgctggcaggcgacttgctgaaccaaaacgtgacggctaactatgtggcaagacacttgaaaatcccatttctttgtatgtttggcgcctgttcaacatcaatggaaacagtggctgtcgcatcagccttagttgatggagggtttgccaaaagggcactcgctgccaccagcagtcacaatgcaactgcggaaagacagtttcgctatccgacagaatacggaggccaaaaaccggacactgctacctccactgtaaccggaagcggtgcagttgtcatcagtcagacaccgggtgatatccaaatcacaagtgcgactgtcgggaaggtttctgatttaggaattacagatccttttgatatgggatcggctatggctccggctgcagctgatacgattaagcagcactttaaagatctcaaccggacagcggatgactatgatctaatcctgacaggtgacctgtcaggcgtcggttctccaatcgtaaaagacattttaaaagaagatggatatccagtcggcacaaagcatgatgattgcgggcttctgatttacactccggatcagcaggtctttgccggggggagcggctgtgcttgttcagcggttgtcacctactctcatatttttaagcagctgagagaaggaaaactaaaccgtgtatttgtcgtggcgaccggggcgctattaagcccgacgatgatccagcaaaaagaaaccatcccgactatcgcccacggggttgtatttgagcgtgcaggaggtgcatcttaacatggactaccttttggcttttgtctgcggcggggccatttgtatcgtcggccagctgctcttggatatttttaaattgacgccagctcatgtcatgacatcatttgttgtaatcggtgcaatattagatggtttcggcatttacgataaatttattgaatttgccggaggaggcgccaccgttccgatcgtcagcttcggtcacagtcttctgcacggcgccatgcatcaggcgcatatacacggatttatcggaatcggcatggggatttttgagctgacctcggccggtatctcagccgctattcttttcgcctttatcgtagctgttattttcaaaccgaaaggataatgccgacatgacgacaaaacgcaaggtcatactggtaacagacggggatgtttatgccgctaaaacaattgaatacgccgcaagcaaagtgggaggccgatgcatttcacaatcaaaagggaatccttccacccgcagcggcgccgagcttgtcaagctgatcgcctcagcaccgtatgatcctgtatttgtcatgtttgacgactccggccttcaaggagagggtccgggagaagccgctctaacctatgtcgcaacccatccgtctattgaagtgctcggtgtgattgcggtcgcgtcaaaaacacatcaggctgaatggactagggtcgatgtaagcattgaccgcaatggagaaataactgaatacggcgtcgataaagtcggggaaagggaatttgatgaccacagaatgagtggagatacagtctattgccttgataaacttgatctcccgcttattgtcggtatcggggatatcggcaaaatgggcagaaaagacgatatctcaaaagggtcgccaatcaccatgaaagcggtcgagtttattttagaaaggagcgggtatcatgccggaccacaaggaagagaaaattcgggtttatcggaatccagctaaaaatgaagagtatttcaaaaaccgtgttgggatggggacgagctatgatgtaggtgttcgcaagctcacgattttagataaagagatccagctttactatctaaatggattatgcgatacagcctatattattcatttaatgagagagcttgttgccattaacaatcggaaagaagaccctgatgagctggtcgacatcgtcgaaaacaggctgcttaacgcccaggtcgaaaaagtaaaaaccttggatgaaaccaccgaccaagtgctgtccgggctcgtcgctgtcattgttgaaggtgcaggcttcgcatttataattgacgtcagaagctatccgggcagaaacccggaagaacctgatacggaaaaggtagtcaggggagccagagacggatttgttgaaaatatcgtcgtcaatacggcccttctcagaaggcggatcagagacgaacgccttcgagtcaagatgacgaaagttggtgagcggtcaaagacggatttaagcatttgttatatagaagatatagctgatccggatctggttgagatcgtagaaaaagaaattgcatccattgatgtcgatggattaacaatggcagacaaaactgtcgaggaattcattgttaatcaaagctataatccttttccgctcgtgcgctatacagaaagaccggatgtggccgcaaatcatgttctagaaggccatgttatcattatagtggacacatcgccgagtgtgatcattaccccgacgactttatttcaccatgtgcagcatgctgaagaatataggcaggcgccttcagtcgggacctttttaagatgggtaagatttttcggtattcttgcttctactttatttcttccgatctggtttctctttgtgcttcagcctgatctgctcccggacaacatgaaatttatcggtttaaataaagatacgcatatcccgatcatcctgcagatatttttagctgacttaggaatcgagtttctcagaatggctgccattcacaccccgacggctttatcgacagcaatgggtttaattgccgctgttctgatcgggcagattgcgattgaggtcggccttttttctcctgaggtgattctgtacgtctcacttgcggcgattggaacctttacgacgcctagttatgaattaagcttggcaaacaaaatgagccgtcttgtcctcatgatactcgttgccttatttcatataaaagggctcgtcatcggatttacagtgctaattattgccatggcaagcatcaaatcccttcagacaccgtacttatggccgctgattccctttaacggaaaggcgctgtggcaggttcttgtccgcacagcgaaacctggcgcaaaagtaagacccagtatcgttcaccccaaaaatcgcttaagacagcctaccaattcataatcgcattgaaactgactgaagagtatgataatgtatgtcttaattatgaagggacagtccataaaactgtcctttcatccataagcggagaaagagggaatgacattgttcttacacggcacaagcagacaaaatcaacatggtcatttagaaatcggaggtgtggatgctctctatttagcggagaaatatggtacacctctttacgtatatgatgtggctttaatacgtgagcgtgctaaaagctttaagcaggcgtttatttctgcagggctgaaagcacaggtggcatatgcgagtaaagcattctcatcagtcgcaatgattcagctcgctgaggaagagggactttctttagatgtcgtatccggaggagagctatatacggctgttgcggcaggctttccggcagaacgcatccactttcatgggaacaataagagcagggaagaactgcggatggcgcttgagcaccgcatcggctgcattgtggtggataatttctatgaaattgcgcttcttgaagacctatgtaaagaaacgggtcactccatcgacgttcttcttcggatcacgcccggagtagaagcgcatacgcatgactacattacaacgggccaggaagattcaaagtttggtttcgatcttcataacggacaaactgaacgggccattgaacaagtattacaatcggaacacattcagctgctgggtgtccattgccatatcggctcgcaaatctttgatacggccggttttgtgttagcagcggaaaaaatcttcaaaaaactagacgaatggagagattcatattcatttgtatccaaggtgctgaatcttggaggaggtttcggcattcgttatacggaagatgatgaaccgcttcatgccactgaatacgttgaaaaaattatcgaagctgtgaaagaaaatgcttcccgttacggttttgacattccggaaatttggatcgaaccgggccgttctctcgtaggagacgcaggcacaactctttatacggttggctctcaaaaagaagtgccgggtgtccgccaatatgtggctgtagacggaggcatgaacgacaatattcgtcctgcgctttaccaagctaaatatgaagctgcggcagccaacaggatcggagaagcgcatgacaaaacggtatcaattgccggaaagtgctgtgaaagcggagatatgctgatttgggatattgacctgccggaagtaaaagaaggcgatcttcttgccgttttttgtacaggcgcttatggatacagcatggccaacaattataaccgtattccgagacccgccgttgtatttgtcgaaaacggtgaggctcatttagtcgtgaagcgagaaacatacgaagatattgtaaaacttgatctgccatttaaaacgggtgtaaagcaataaaagaaagcgccgatttttcggcgcttttcctatttgaatatagatacaatcgcattccagatagatacgaagaaatcaatgactttctggatgaagtttttgccttcatctgattctatgaatttcgtaatcttatctttcgctttatcaagctggtcactgacctgtccccagtcaatgtcagcatttttcatcttattgaatagggagacaagctgattcttttggctgtctgtaagcgtgacatttaaatcagaagctgcgtcgtccacttgtttttcgatgtcagctttattatcaggcaccccgtttttagcaaactcttctttgatttttgcaatcagggctgatgcattttcgttaccgattttgtctccaagctctgatgtcgtgacaagctcttggttggcgacttgtttaacatcctccgagatcgcttcgtctgaagaaacttcatacgccttaatcaatccagttaaagccgcagtcccggatacttcaaacggtgctgtaacatacaccttcgcatctttcacaccggctgtcatcagtgcattcaggtacatttcatctgtgatgccgctgatattatgggtctcaacattcaatccggagccttttttggcaatggtgattgacgaagaagaaatcgctctcgatccgatttgcgcgtttgatatatattttcctaaatattcatgttcttctttattggtcacggttaccgttgtggcattatcagggacattcatttcatcaagcactttttgtttgtcggattctgacaaatcagcacccagtgttacaatgacatctccaactgcggcatccgcgagactgaccttcggaaccgtcagcagcaaaacggccgctgccagcattccaatccaaattttcttcaaagcagtttgacctccttcaatttcacaagcagctggatagtgctgctttgtgaggacctgaatcatgaaaaatacagttccgttaggttagacggagataaagagattcaggtttcatttttattttttagtaaagcccgggagattcgttttcccccgaaaggtgtggtataatagccgcgacaaggagagacaggctataacctatcatacataatctcctttgaaaattaaaataaagaaagtaggcatacaattgaaaacaggttactttttattagaagacgggaacaaaattgaatttgaactttatcctgaagctgcacctggaactgttgcaaactttgaaaagcttgcaaacgaaggcttttatgacgggcttacattccaccgagtgatccctggcttcgtcagccaaggcggatgcccgcacggaactggtactggcggcccaggatacacaatcaaatgtgaaacagaaggaaacccgcatacacatgaggcgggcgcactttctatggcacatgccggaaaagacactggcggcagccaatttttcatcgttcatgagccacagcctcatttgaacggtgttcacactgtatttggtaaagtaacaagcggattagaattcgcgaaaaacatgtctaatggcgatgtcatgaaagaagttcgcgtagaaggctaattggcaggcaaaaggcttcctcatatagagggagcttttttattgggtaaaaatattcaataaaaaaccgccgagtgctgatggcggttggcaaaaccaggtgtttagttagtgagacatcgcaagcccccgtaatgaatcgattaaaaagttttggtgacgttttgatcagtaaattgatgattaatcattttagctttgcttacaaagttattttcaaagacaattcctgtgtttaaacctccggagccaaacacagatttggacaaagttaaaggcctgatcataaaagcgccgcctacgttaattacactgttcccggaaacgttgtttatattaataggataatcaatcatactatcaagtctcctttcatatcattctattttttatatgtattagtgctagagttgattagcgtaaacttatcggcaaaaatatttaggagatgcctgtttttattgatttataaaaatgctcgaaaaaagagcctcctttaaagcttccggaagcccagatatctgtctattcttttaactactctgaatgcggcagctgcttttctggcgaatgtaataggatcatcctgtgctgactcaaagtgcatatacattgctcacggctcactaaataaccagtggttatgcaatgtagaaatcgccatacgccgctatcctagttcggtgagcaaagaatttacctcttcatgtaagaaactaagtgaaatactttaccatttcgaacctcaaacgggaaaaatggggaatggccaagggatgaggtgggcaaacaaacacctgactcggtggcagaacgaactgcccaaaattttggcaaactccctgcgtatcttttgtttcctcccatttcatgctattgctcctcctatgtcaaaaaagaatgtatgagagaagatcccgccatagacaatgttgttggacgactgaagataaaattgtgctgattatacaaaaagtggattgggaatgataaaagaacaaaaaagtttaaggagaatcacatgcaagttttgacagggttgctcgaacagtacggatatgccgtcttgtttattgtcttgatgttagagcttctagctttacttggaccgggagagtttgccggtgttctcgtgtttcaagaaaagttaaactgggtgctaagcatgttagcggccggattggggagctgtgggagtgagcatgtcgtattggatcgggtatagactgggcccagctgcaattcagaaagcttttgcgtcgagaggtgttctgttagccgttattgttctaacttttttttggacggtattcagagggcaagatcggaaaatcgaactctctttcttatttttcctagtcattggtggggagctttatgaagagggaatcagacggctctttcattcccttcatcctgttcacgctcctttggaaagtcatgtattatatccattcccgagcgaacagactttaacggcatttgtcatttttggtttttgtgcttatctttttgttcgtcattctcacaaggcgtgtctgcaaactgttgcgtttttttgtttattatcgttttattcctcatcgggctgagccgtgtgtacgttaatgagcagtatccgagtgatgttgctgcgggttacgccttcggcggtgtttggctgagtttgaatgttttggtcatggagcttttccgtttctccagaagatttaccaagctgagaaacgaacccaattagtatgtaatcaaaattaagtaaactttaaagtagtacgggtcattgggattgatattttgtagtaaaataaatcaaacaaacgtgatgtaatgaaaaggagatcgcgatatgaacaacaaaggctgtataaaatgcggtagtactgaagccggacaaaaagaaatagctacaaccggcacgggattatcaaagctgtttgacgtgcagcataaccgatttctagtggtttactgtaagaactgcggatattcagagttttataataaagagtcttcaactgccgggaatatattggatttattttttggaggctgatccatgttttttttcgagcttgaatgattttaaacatatcatgaaagcaaaaacgggatgcggttatcacctgtgaaataggttgctgcaaacattccagtaacctttatgacgtgaattgttttttgtcaagtgccatgggtatcatggactgggagatcaatggaatgcagtaaatgaacaaactgctcgtaacctcatgctttatatacgatctaaagattttgcatatgagaactctctttcttctgagtccatcgcttctgaattatgcgattcatttccttcaatattgcaggcttagttatgcatgatgtgggtagaagatgaagattaacagtttgtaaaatcacttcaatggtcctaatgggattttttttcgattcgtgataacataaattgaagaccgttgtttattggaggaaatcagttgaaatcagaaaatgtttcgaagaaaaaatcaatattagaatgggcaaaagcaattgtgattgctgtcgttcttgctttgctcatccgcaactttatttttgcgccgtatgtcgttgacggtgaatccatggaacctacacttcacgatcgtgaaagggtctttgtcaatatgacagtcaaatacatcggcgaatttgatagaggggacattgtcgtgttaaacggagatgatgttcactatgtcaaacgtattatcggccttcccggcgatacggttgagatgaaaaatgaccagctctatatcaacggtaaaaaggtggacgaaccttatttggcagctaataaaaagatagcgaaacaggacggtaaacctttgaccgatgatttcggcccggttaaagtgcctgataacaagtattttgtgatgggtgacaatcgtcggaattccatggacagccgtaacggacttggcctcttcacgaaaaaacaaattgcgggtacgtcaaagtttgttttctacccgtttaatgaaatgcgcaaaacaaattaggatcaagcagtttcccattggggctgcttttttttatatcttttttacggtcatcccctaaaaacagaacataaattcgtatatctatagaaaagaaatttttgcagaaatgtgaaacatattcccgttatgcatcgttatattaataatttacgagaatttacggttttttattcatgaaaaaaaggaataactcatatgaatgaatagattcatattggctggaggtttagaaatgggaagaataaaaaccaagattaccattctgttagtgcttttgcttttacttgcaggcggttatatgtacataaatgatgttgagctgaaggatgttccgacagcaattggacaaaccttgtcctcggaagaagaggaatacaccatccaggaatataaagtgacgaaaattgacggctcagagtatcatggagtagcagaaaacggaacgaaaatcatcttcaacggaaaaaaattaaatcaggatttatctgatataaaagaaggtgacaagattaaggcatacttcagcaaatcaaagcggatcgacggattaatcaaggttgcaaaagtgaatgattaaaaaacatcacctttcggatcgaagggtgatgttttgtttttctcaaattgtaagtttatttcattgcgtactttaaaaaggatcgctataatagccaataaggacaaatgaataaagattgtatccttcggggcagggtggaaatcccgaccggcggtagtaaagcacatttgctttagagcccgtgacccgtgtgcataagcacgcggtggattcagtttaagctgaagccgacagtgaaagtctggatgggagaaggatgatgagccgctatgcaaaatgtttaaaaatgcatagtgttatttcctattgcgtaaaatacctaaagccccgaattttttataaattcggggcttttttgacggtaaataacaaaagaggggagggaaacaaatggaagagtattatatgaagctggcattagatcttgcgaagcagggcgaaggacagaccgaatccaatccgctcgtcggcgctgttgtcgtaaaggacggacaaattgtcggaatgggcgcccatttaaaatatggtgaagctcatgcagaagttcatgccatccatatggctggagcacatgcagagggtgccgacatttacgttacactcgaaccgtgcagccattacggaaaaacaccgccatgtgcagaattgattatcaactctggcatcaaaagagtgttcgtggcgatgagagatcctaatccgcttgtggctggaagagggatcagcatgatgaaagaagccggcattgaggtaagggaaggcatcctggcagaccaggcggagaggctgaatgaaaaatttctgcactttatgaggacaggccttccgtacgtcacgctaaaagcggctgccagccttgacggcaagatagctaccagcacgggtgacagcaaatggatcacgtcagaggctgcaagacaggatgctcagcaatacaggaaaacacaccaaagcattttagtcggagttggcacagtgaaagccgacaatccgagcttaacctgcagactgccgaatgtaacaaaacagccggttcgggtcatacttgataccgtactctcgattcctgaggacgctaaagtgatttgcgatcaaatagcgccgacatggatttttacgacggcacgcgcagaagaggaaaagaaaaaacggctttcagctttcggagtgaacatatttacacttgaaaccgagcgcattcaaattcctgatgttttgaagatcctagcggaagaaggcatcatgtcggtgtatgtggaaggcggttcagctgttcacggaagctttgtcaaagaaggctgttttcaagaaatcatcttctattttgcccctaaactaatcggaggaacgcatgctcccagcttaatctccggtgaaggttttcaatcaatgaaagatgtccccttattacaattcactgatataacccaaatcggccgtgatatcaaactgacggcaaaaccgacaaaggaataggatggtgaccatgtttacaggaattatcgaagaaacaggcacaatcgaatccatgaaaaaagcagggcatgcaatggccttaactattaaatgctcaaagattttagaggatgttcatcttggcgacagcattgcagtgaacggcatttgtctgactgtcactgattttacaaaaaatcaattcacagtggatgttatgcctgaaacagtcaaagctacgtcactgaatgatttaacaaaaggaagcaaagtaaatctggaaagagcgatggcggcaaacggccgtttcggaggccatttcgtctcaggccatgtcgacggaactgcggaaatcacacgaattgaagagaaaagcaacgcagtttactatgatttaaaaatggacccgtcattaacaaaaacattggttttaaagggatcaattactgtggatggcgtgagcttaaccatattcggcctgacagaagacacagtgacgatctccttaataccgcatacgatcagcgaaacgatcttttcagaaaaaacgatcggctctaaagtgaatatcgaatgcgatatgatcggaaaatatatgtatcgatttttgcataaagccaatgaaaataagacccaacaaaccattacaaaagccttcttaagcgaaaacggcttttagagaggaagatttgcatgtttcatccgatagaagaagcactggacgctttaaaaaaaggcgaagtcatcatcgttgtagatgatgaagacagagaaaatgaaggagactttgtggctcttgccgagcatgcaacgccggaagtcattaactttatggcgacacatgggagaggactgatctgcacgccgctcagtgaggaaatcgcagacaggcttgatcttcaccctatggttgagcataatacagactctcaccacactgcatttaccgtaagcatagaccatcgtgaaacgaagacaggtatcagcgctcaagaaagatcttttaccgttcaagcattgctggacagcaaatccgtgccatctgattttcagcgtccggggcacatttttccactgattgcgaaaaaaggaggtgtcctgaaaagagcgggccatacagaagctgctgttgatcttgctgaagcttgcggatctccaggagccggcgtcatttgtgaaattatgaatgaagacggaacgatggcgagagtgcctgagctcattgaaattgcgaaaaagcatcaattaaaaatgatcaccattaaggatttgattcaataccgttacaatctgacaacacttgtcgagcgtgaagttgacattacgctgcctactgattttgggacatttaaggtttatggatacacaaatgaggtagatggaaaagagcatgtcgcatttgtgatgggagatgtgccgttcggagaagaaccggtattggtccgggtgcattcagaatgtctcacaggtgacgtgtttggctctcatcgctgtgattgcggaccgcagctgcacgccgcgctgaaccaaattgccgcagaaggccgtggagtgctcctgtacttgcgccaagaaggacgaggcatcggtttaatcaataaattaaaagcttataagcttcaggaacaaggctatgacaccgtagaagccaatgaggcgcttggattcttgccggatcttcgcaactatggcatcggagcacaaattttacgcgacctcggtgtccggaatatgaagcttttgacgaataatccgcgaaaaatcgcaggccttgaaggctacggactcagtatttcagaaagagtgccgcttcaaatggaggcgaaagaacacaataaaaaatatttgcaaaccaaaatgaacaagctaggtcatttacttcatttctaatcacaaatatcacaaaaaaggatgggaatcatatgaatatcatacaaggaaatttagttggtacaggtcttaaaatcggaatcgtagtaggaagatttaatgattttattacgagcaagctgctgagcggagcagaagatgcgctgctcagacatggcgtagacacaaatgacattgatgtggcttgggttccaggcgcatttgaaataccgtttgctgcgaaaaaaatggcggaaacaaaaaaatatgatgctattatcacattgggcactgtcatcagaggcgcaacgacacattacgattatgtctgcaatgaagctgcaaaaggcatcgcgcaagcagcaaacactactggtgtacctgtcatctttggaattgtaacaactgaaaacatcgaacaggctatcgagcgtgccggcacaaaagcgggcaacaaaggtgtagattgtgctgtttctgccattgaaatggcaaatttaaaccgctcatttgaataatttgctgaaaacagtttaaaaatatggcgaaaatgatataatgtgagaaaacggatcacctattcgtatccgttaatagcagactggacattttggatatagaggggtttttatgttaattcgttataaaaaatcgtttgaaaagattgcgatggggcttctttcgtttatgccgaatgaaaaagaccttaagcagcttcagcagacaattaaggactacgaaacggatacagaccgccagctctttctttggaaagaggacgaggatatcgtcggagcaatcggagtcgaaaaaaaggattctgaggttgagatccggcatatcagtgtgaatccttctcatcgccatcaaggaatcggaaaacagatgatggatgctttaaagcatttattcaaaacgcaagtactggttccaaatgaattaacgcagagctttttcgaacgttgtcaaggtcagcaggatcaagacatttcatacaataattaagcagaggctgtgatcagtctctgcttttttttctgcgttctatttctttttcacgttcacggatgacgtcagtccgatcccgcaaacggtgtttgtcgataagaaatatgttgctgagtgcactgggctgcccccatgtatacttttttttcctgcattcgatcctgcatgcttcctccagtttctcatctttgattggcagtataatgcttttataggcagagccggtttcgatttgttcgtaaaccgattgcataagttcgagcaaacggccatgatcaagccctaagtcttcgactgcccggtgttctgcttgaagaatccggatgctgttcgccatcagtctttttgccccggctgtattctgccttctgtgatgatataaagccactgcaagctgaataaagcccacccaatagcgttttcgtttctttggcggatcttccttccaatattcttctaatatttcatggcattcaaaataatcccgtgtcgcatgaaactcaacgagataatctatataagctttcggatacaaggtgcttcctcctttaatgtgcttttagtgtaccatagaagggataaaaggaaaaaagaacgcccggcctctagtgcttcttagaaaggaaaaccagaagcaaaggctttttctcccgcttctgcgctccgagcaaacacctcttgtgttttgaatattctgtacaaactccttcaaaacaggatatgaaatagtattggacgagagctttttggtggcttatactatagggtagccagtttttccggcaatgagagtgatacttgaaaatggtgagatgatggaagaatatcaagtgaaaattgatacgtttgagggcccattggacctgctgcttcatttaatcaatcgtcttgaaattgacatatatgatatacctgtggcgaagatcactgaacaatatttattatatgtacatacgatgcgcgtgcttgagctcgacattgccagcgagtatttggttatggctgccacgctgctcagcattaaaagcagaatgctgctcccgaagcaagaggaggagctttttgaagatgaattacttgaagaagaagatccgcgggaggaactgattgaaaagctgattgagtaccgaaaatataaagatgcggcgaaggatttaaaagaacgggaagaagaaagacaaaaatcgttcacgaaaccgccgagtgatttgagtgaatatgcaaaagaagtaaaacagtctgagcaaaagctctctgtcacggtctatgatatgatcggagcttttcaaaaagtgctgaaacgcaaaaaaataaacaggccgatggaaacaacaattacaagacaggacataccaatcgaagccagaatgaacgaaatcgtgcacagcttgaaatctagaggaacgagaattaactttatggatctgtttccatatgagcaaaaagaacatttagtagtgacctttctagctgttcttgagctgatgaaaaatcagctggtcctcattgaacaggagcacaatttttcagatatttacattacggggagtgaatccattcatggggcttgatatcgtgaattggaaagctattgtggaagcccttctttatgcggcaggcgatgaagggcttacaaaaaagcagctgttaacagtgcttgaaatcgaagagcctgaactgaacacgatcatggcggatgtggcggacgaataccgcggagatacacgagggattgaacttattgagtatgcagatacgtacatgctctctaccaaaaaagactttgcgccttacttgaaaaaactgattgaagtgccgtcaaagggcctttctcaagcatctttagaagtactggccattgtttcatacaaacagccaattacgagagcagaaattgaagaaatcagaggagtaaaatcagagcggattttacacagtcttgtcgcgaaggcgctattgtgtgaagtagggcgtgccgatggtccggggcgggccattttatacggtactacgccgacttttcttgaacaattcggtctgaaaacgctggacgagcttccgccgctgcctgaaaatgcggaagaagacgttcttcaagaagaagcagatttattttttgaaaactttaaccaaaccttcgaagatataaaatagaagtttaatgaatcgcgctttttcatcatcataagatataaggaagaagctatcatgaaagaagcaaaatgtgagagacaaatacatgaggggaagataccaaacgaaatgggacattcgattgtgcgagcgcagactcaaaaaacaggcgaattcttatcaatggttgtcaataccgtgaacgattacctaaatcaaacgacgcttgagtccttacaggctgaattgcctattgaaaaaggatactgctgtgatgtgcttagcactctgagaagaatggcagtattttgtgaaggaggcgcagaagcgtgccgtcgtctcctgatgcaggagccttttcaggaagccagagcggaaaaaacactttataatgtgtatcaccaatgcattgaagagttctttatgccgaaaaaagacacgtggtgtgaaaatagccgggcgtcttataccggggtcagcgcaattgagttttatcatgctgttcctgcgtcgcttgagcaattattattgccgttgagcgcggcctttctgaagatgagggaagagctggctcattacgaagcgtccggatcaagcatggcgccaatcagataacgtttactctccctttttcagggagagtttttttatgtttgcttccagaaatataattgttattcataactgatggacatgcgcataaacttgtacaaaccaccacaaggacgtgagcaaacatgcgcattttcaaaaaagcagtattcgtgatcatgatttcttttcttattgcaaccgtaaatgtgaatacagcacatgctgctatagatgtcagtgcaaaaagcgcgatcattattgacggtgcgtcaggcagagtgttatatgccaaggatgagcatcaaaaaaggcggatcgcgagcatcacaaaaattatgaccgccgtcctcgccatcgaatccggcaaaatggatcaaacagtgacggtttcggcaaatgctgtcagaacagaaggctccgccatttatttaacagaaggtcaaaaagtgaagctgaaagatcttgtgtatggcctgatgctaagatcaggaaacgatgccgctgtcgcgattgctgagcatgtcggtgggagcctcgatgggtttgtttatatgatgaatcaaaaagccgagcagcttggtatgaaaaacacccgttttcaaaacccgcacggattggacgaccatgaaaatcattattcaacagcctatgacatggccattttaactaagtatgctatgaagctgaaagactatcaaaagatttcaggcacaaaaatatacaaagcggaaacgatggaaagcgtatggaaaaacaaaaacaaactgctgaccatgctttatccgtacagcacaggaggaaaaacaggctatacaaaacttgcaaaacggacactggtctctacggcttcaaaggacggcattgacctgatagccgtcaccattaatgaccctaatgattgggatgaccatatgaagatgtttaactatgtgtttgagcattatcaaacctatttaattgcaaaaaaaggggatattccaaagctgaaaggcacattttatgaatcgaaggcttttatcaaacgtgatatcacctatttgctgaccgaagaggaaaaagaagatgtaaaaattaataccacactgctcaagccgaaaaaagcatgggaaaaagatgcctcgaaaatccctgacatcgtagggcacatggagatcatgttcaacgatgcaaccatcgcaaaagtgccgatctattatgaaaatgagcggcatcaaaaaccgaagaaacaattttttgaaacgtttaaatcaatctttctgaatgcggcaggcggagcaaaatggtcaatataatttgggtcagtttaaccgtgatcggactcgtttttgcgatgtgcaacggaactctgcaagatgtaaatgaagccgtgtttaagggtgcaaaagaagcgattacgatctcattcggattgatgagcgtgcttgttttctggcttggcttaatgaaaatcgccgagcagtcagggcttttggatattttcagccggatgtgcaggccttttatatctaaactgttccctgatataccgccggatcacccggcgatgggctatattttatctaatcttatggcgaatttcttcggcctcggaaatgcagcaactccgcttggcattaaagcaatggaacaaatgaaaaagctgaacggaaaccgatcggaagcaagccggtcgatgattacttttttagctgttaatacgtcctgcatcacactcatcccgacaacggtgatcgctgtccgaatggcttattcctccaaaacgccgacagatatcgtcgggccaagcattttggcaacgcttatttccggaatcggtgccattatcattgatcggtatttttattaccgccgcaaaaagaagggaaggtgagcggatggaaatcatcaactggctgtctttagccatgattccaatcattattgccggaattcttctttatggaacgatcaaaaaggttccgacttatgaatcgtttgtcgaaggcggaaaagaggggatagaaatcgccttttccattatcccctatttagtcggaatgcttgtcgctataactgttttcagatcatcaggcgcgcttgattttataatggatcttttaaaaccggctttctccgctatcggcatccctgctgaagtagtgccgcttgctctgatccgcccgatctccggtacggccgcactcggaatgacgaccgatttaattgcagtatacgggcccgattcctttatcggcaggctggcttccgttatgcagggatctacagatacaacgctttacgtactgactgtgtatttcggagcagtcggcattaaaaaaatgggtgatgcattaaaggtggggcttcttgcagatttaatcggcgtagttgcatctatcatcatcgttacgttattatttgggagcgcctgaaaacggcgttttttttagatttggcataggaatttgaaaaagcttgtttgttaaggttgaaaaaagtaagataatacttgaggtgaaagacatggaaagactgcaaaaagtaattgctcatgccggagttgcgtcgcgcagaaaggcagaagagctgattaaagaaggaaaagtaaaggtgaatggcaaagtagtaacagagctaggtgttaaggtcaccggttctgatcagattgaggtaaacgggttaaaggttgaacgcgaagagccggtttactttctcttatataaaccaagaggcgttatttccgcagcgcaagatgataaaggacgcaaagtggtgacggacttttttaaaaatattccgcagcgcatttatccgattgggcgtctggactatgatacgagcggtcttttgcttttaaccaatgatggcgaattcgccaataagctgatgcatcctaagtatgaaatagacaaaacatacgtggcgaaggtgaaaggaatcccgcctaaagagctgctcagaaagctggagcgtggaattaggctggaggaaggcaaaacagcgcctgctaaagcgaagctgctgtctttggataagaaaaagcagacaagcattattcagctgacgatccatgagggacgcaacagacaggtgcgccgcatgtttgaagcgatcggacatgaggtaatcaagctgaagcgtgaggaatacgcgtttttaaacctgcgaggcctgcacacgggcgatgccagagagcttacgcctcacgaagtaaaaaggctcagagcactggcggatcacggtaaaaacgctttctaaatttcacataaccttcaaaaagtaagaaatgtgaaatgaacgtgcaatgatataattgaatggatctgcaatagggggaagggggcagtggacaatgaagaaaaaaaggcgtttattcattcggaccggcatccttctcgttttaatctgcgcactcggctataccatttacaacgctgtatttgccggcaaagagagtatatccgaagggtccgacgcaccgaattttgtcctagaggatacgaatgggaaacgtatcgagctcagtgacttaaaagggaaaggtgtttttttgaatttctggggtacatggtgtgaaccgtgcaaaaaagagtttccttatatggcaaaccaatataagcattttaaaagccaaggtgttgaaattgtcgctgtaaatgttggggagtcaaagatagcagtacataattttatgaaatcctacggagtcaatttcccggttgttctggatacagatcgccaagtgcttgatgcctatgacgtatctccgcttccgacaacctttttgatcaatccggaaggaaaagttgtcaaggtggtgaccggcactatgacagaaagcatgatacacgattatatgaatctcataaaacccggagagacttcgggatgaagcaagtcaaatgtgaatgcggacatataaacccggtcggaaccgttttatgcgaatcgtgcggaagagctcttcaggaaactcaacctccgctcgctgatatgagatatgacggaagcgcaagacgttcgcaaacctataacaaaacgatcatcgacaaaatttggaatttcttttcctcggttaaggtgggaatatggcttatcgtcataacccttgccgcatcagcgttcggcaccatttttccccaggaagcctatctgcctccgggcgcacaggctgatacttattacaaggagcagtacggcacgttcggccagctttattatttgctcgggtttcatcatttatatggttcttggtggtatttgctgctcattgcctcgatcggcatttcacttgtgatttgcagccttgatcgggtcattccgttgtacagagcgttaaaaaaccaaggcgtcagaaggagcccggcttttttaagaaggcagcgcttgttcagtgaaacagttacagtactgaacggggaatcgaaagaaaagatagttgctctattaaagaaaaaacattatagaatcagagaaaaagagggcagcattcttgctgaaaaaggacgcttttcccgctggggcccgtatgtcaaccatattggattgatcatctttctgattggtgcgatgctgagatttgtgcctggcatgtacgtcgatgagacgctttgggtcagagaaggcgaaaccgcagcaattccgggtacagacggaaaatattatttaaaaaacaatcaattcagcgtagagacctataacagcaaaacggaaaaaaaggtatttgcagatgccattgacagagtcggggacggtagagtggcaaagaactttcaaaccgatgccgtactctacaagagagaaggaaaaattgtttatggcgagaagccgaagctgaaaaaagtaacagaagaagacatccgtgtcaatcagccgctgcgttttgattctttttccgtttaccaggtggattacaaagagaatcagcttgaccagatggtgttccagctgattgataaaaaaacaaaaaaatcctttgggagcctgaagatcaaccttctggatccagattcggtctatgatcttggcaacggttacaaggtggaaatcgccagctacctgccagacttctattttaatcaggacggagagccgagcacaaaaacaaagatccctaacaatccggcttttgtctttaatatcataacgccggacaaaccgaaaggcgaaaagagctttgtcgccatccaagaaaccatcgaagggtcaggcaaaaataaatacaagctgaaatttgaccatgtcgaaacgaaaaacattactggacttacagtcagaaaggatctgacactctgggtgcttgctgtcgggggagccatttttatgatcggtgttattcaaggtatgtactggcagcatcgaagaatttggctgcactcacaggacggtgcagttatggtagcagggcataccaataaaaactggtttggcctgaagaaggatttagcatttatattggctgattccggactgactgaaccggtggaccaaaaagaattaatcaaaacacagaaataggcgaaaagggagtgatgtcatggcagagctgagcggaaattttctttatgcggcctttcttgtgtatttaatcgctgtcccaatcttcggcggggccatacgcgggaataaagataaaaagggcaggccaaaccgatgggccaacattggaatcaccctttctattgtcggttttttctgccacctaggatatttcatcacaaggtgggctgccagcggccatgcgcctgtcagcaatatgtttgaattcaccaccgcttttggcatgatgcttgttttggcgtttatcattctttattttctctatagattgccttcattaggcctgtttacgctgtcaattgctttattgctgattgcctacgccagcatgtttccgacagatatctcgcctttaattccttcgctccaaagcaactggctgtatattcacgtaacaactgccgcgcttgggcaagctatacttgccatcagctttgtcgctggtgtcatctttcttttgaagcatgtagaccagacaaagccaagcaaaaagaccttctggcttgaagcgattatgtttatcctggtcacaaccgtcgcctttattgcaatcacatcagcatttcgtcttgcaggctatgaagcggagtttaactgggtggacaaaagtaaagaaaaaagcgtgatggtgtatgaaatgcccgcgcttgtcggtccgcatcagggagagcttttgaccgaaggaagaatggaaccgcttgttgatcttcccgcgcttttctcaggcagaaaagtgaacactgtcatttggtcatttggagcaggtcttgtgttgtatggggctctccgtctgatcatcagaaaaagaatcagcgctctattacatccgctggtgaaaaacgtcaatcttgatctggtggatgaggttgggtacagggccgtatcaatcggatttccgatctttacactcggcgcgctgatctttgcaatgatttgggctcagctcgcgtggaccagattttggggctgggaccctaaggaagtatgggcgctgatcacgtttttgttctatgccgcttacttgcacttaagactgtcaagaggctggcacggtgagaagtcagcatggttggccgtaatcggttttgctattattatgtttaatttaatattcgtaaatcttgtgcttgccggacttcattcttatgcatagtcctttgaaagcgacacagttctcaaactttctcacgatttgataaaatgaaagtaacagaaggaaagcagggggaaaacatggaccaaacgaacgaaacaaaaatattagtagttgatgacgaagccagaattcgccgccttttaagaatgtatcttgaacgtgaaaattatgctatagatgaagctgaaaatggtgatgaagccattgccaaagggcttgaagccaattatgacttaattttgcttgatctgatgatgccggggactgatggaattgaagtgtgccggcaaattcgtgaaaaaaaagcgacacccattattatgctgaccgcaaaaggagaagaagcaaaccgggtgcaggggtttgaagcgggaacagatgattatattgttaagccgttcagcccgagagaagtcgtgctgcgtgtaaaggcccttttgagaagagcatcccaaacctcttatttcaatgccaatacaccgacgaaaaatgtgctcgtgttttcacatctgtccatagaccatgatgctcaccgcgtaacagctgatggaacagaagtgagcctgacgccaaaagagtatgagcttctatatttcttagcgaaaacgcctgacaaggtgtatgatcgggaaaagcttctgaaagaagtgtggcaatatgagttttttggtgatttacggacagtggacactcacgtcaaacgcttgagagagaagctgaacaaggtatctccggaagctgcgaaaaaaattgtcaccgtatggggtgtaggttataaatttgaggtcggcactgaatgaaattttggaaaagcgtagtaggcaagctgtggtttacgatcctttcactcgtcttgatcgtattgttcattttaacggttcttttgctggagtttattgaaaactaccatgtggaagaagctgagaatgatttaacacagcttgcgaataaagttgctgtcatcctagaaaatcacgaggaccaggcactggcaaggtcaatcacttgggaactcgctgataacttaacaagcattgccatcatccaggatgagaagaaccactggtattctccgaatgataaaaatcgcctgtcgtctattacggttgagcaaatacagcatgacaaagacttaaataaagctctcaaagaccataaaaaagtaagcaaacggacgggactgagcgatacagacacggataatgaacgcctgattgtaggtgtcccgtatgaaaaagacggaaagaaaggcatggtctttttatcccagtctttgcttgccgttaaagatacaacaaaacatacgacccgctatatttttcttgccgctggaattgcgattgtgctgaccacatttttcgcattctttttatcaagcagggtcacgtaccctctccgaaaaatgagagaaggcgcgcaggatttggcgaagggcaagttcgatacaaaaatcccgattttaactcaggatgaaatcggtgaactggcgaccgcttttaatcaaatgggccggcagcttaactttcatatcaatgcgctcaatcaagaaaaagagcagctttctaacattttgagcagtatggctgacggggttattaccattaatattgacggtacgattcttgtgaccaacccgccggctgaacgttttcttcaggcttggtattatgaacagaacatgaatatcaaagaaggcgacaaccttccgcctgaagcaaaagagctgtttcaaaacgctgtcagcactgaaaaagaacaaatgattgagatgacgctgcaaggcagatcatgggtgcttttgatgtcgccgctttatgcggaatcgcacgtcagaggagcagttgccgtactgcgtgacatgacagaagaacgccgccttgataagctgcgggaggactttatcgcaaatgtcagtcatgagctgagaacaccgatctccatgcttcagggatacagtgaagcaattgttgatgacattgcaagctctgaagaagaccggaaagaaattgcccaaatcatttatgacgaatcgctccgaatgggccgtttagttaatgatttgcttgatttagcccgaatggaatcaggccatacaggcttacattatgaaaaaatcaatgtgaatgagtttttagaaaagatcattcggaagttttccggtgttgcgaaagaaaaaaatattgctttacatcatgacatttctctcacagaagaggaatttatgtttgatgaagacaagatggagcaggtatttaccaatttgatcgataacgcgttgcggcatacttcatccggtggtagtgtctccatttcagtccattctgtgaaggatggattgaaaattgatatcaaagactccgggtccggcataccggaagaagatctgccatttatctttgagcggttttataaggcagataaagcgcggacacggggcagagcaggaaccgggttagggctggctatcgttaaaaatatcgtggaagcccacaacggatcaattactgtgcacagccgaatagataaaggaacaacattttctttttatattccgacaaaacggtaaaatcgagtctgaatttgccgaagaatcttgttccataagaaacacccgctgactgagcgggtgtttttttaatagccaacattaataaaatttaaggatatgttaatataaattcccttccaaattccagttactcgtaatatagttgtaatgtaacttttcaagctattcatacgacaaaaaagtgaacggaggggtttcaaatggaagaaacctttcaattattatatgatacatatcatcaagatttgtaccaatttttattttatatggtaaaggataaaaaccagacagaagaccttcttcaagaggtttatatccgggtattaaattcttatcatacgtttgaaggaagaagcagtgaaaaaacatggcttttgtctatcgcacgccatgttgcgatagactggttccgtaaacagcaaacaatcagacagcgtatactcggtacatttgactgggatacacaggatgtcagggatcagcaattgctaccggacgaacttgccgttcaacatgaaaatgtccgggaaatttatgctgcgcttgatcaatgtacaatcgatcaaagagctgtgattatcttgcggtttattcagggatattcaatacaggaaacagccaaggctctgcgcttctcggaaagcaaagtaaaaacgacccaacacagagggctcaaagtacttcggaaacatatggagcttttgagggaggagctaatggatgatgaagtcagaatggaacgaagaacagataaaggagttgttaagtcaacttccggcagttaaagaccatcgttcgcctcaggatatttacaagcggctgacgatggcaaagcgtaaaaataagcccgctgtcaggtggattggccccgcgtgtgccgctgcaattgcggtttatatcgccttcattatttctcctcatttctttgatcaggcacagcctcaacaaaaagaagcgtcccaagagaacgcagtaacgaaaactgagacagaagacagcccaaaagctgcatcgtccttggatcatacatcgtttgttgtacctgaaaaggaacaagacaattacatcactgtagcagttgctgatgccgatacatccgcaatcatacccgtcagcatccaaaaaacaaatgcagaccaaacgatccaggatatgctgtttgaaagtagtgaattgggcatccttgatcatgccattacaattccaaccttcatagatgaagtagaaataaaggaaaaaccaaagcagaaggaattaagtatacgagtccatcagccagctacggcattttctgtaaaagatgatacactgttaaaaaaattgcttaaagaatccttaaaatggagtccttatgaaaaagtcaaatttttatcggatcaaaatgagactggggttcggattggctcatatggcacttttacggaaatttcgattcccaaacagtcaaaacgatcctactacttgtaccaaaataaacaaggacaagactttctcgttccgtcaaatcattcttttgatacagtaaaagaagcgattaaggaaatggaatcgagcagccaagaagatacgacacctcttattcaagcgggtgctgtccaatctgtaacgaagaaacagaaacacttatatatccgcttttcaaaggactcagaagttgaggattctattgccggtattttaatgattgagggacttcttttaaccgcaaaagagtttggcttcacagaagtgacctttgcggaaaccagaacgaaaaaaatcggcaaatatgacgtatcagatgcaattccggtgccagctgctccaaatccgattttcttaaactaaaatgggccctttgaggctcttttttagttgctattcatataatagaaattttcaaaaaaaagttgtacgtgtataataaaacaaggtaacgattgaaaggatttgagatgagtgaacgtgttaacaattaaaggagtttccatcggggaaggaatgccgaaaatcatcgttccgctgatgggaaagacggaaaaacaaattctgaatgaagcagagacagtaaaattactgaatccggacattgttgaatggagagtcgacgtatttgaaaaagcgaatgacagagaagcggtcacaaagctcatttctaagcttcgtaaatctttagaagacaagctatttctatttacattcagaacccacaaagagggcgggagcatggagatggacgaaagctcctatcttgctttgctggaatcggcaatccaaacaaaagacatcgatctgatagacatcgaattattttcaggagatgcaaatgtaaaagcgttagtatcgatggcggaagaaaacaacatctatgtggtgatgtcaaatcacgactttgaaaaaacgccttcgaaagatgagattctttcaagacttcggaaaatgcaggatttaggagcgcatattcccaaaatggctgtcatgccgaatgatactggagatctcctaacactgcttgatgcgacgtatacaatgaaaacaaaatatgcagaccgccccattattacaatgtcaatggctgcaacagggctcatcagcaggctgagcggtgaggtttttggatcggcttgtacttttggagctggagaagaggcgtccgcaccaggccaaattcctgtttctgagctaaggagtgtcttagatattttgcataaaaacacacggggatagaacaataaaaaaactcaagctatatagcttgagtttttttgattatggcagatcaatgagcttcacagacacaatatcagggacatttgttagttctttcacaattttatcttccagatgtctgtcaaaggaaagcatcatgatggcttctccgcctttttccttacggccaacctgcatggttgcaatgttaatatcattatctccgagaatacgtcctactcggccgatgacacctgttgtatcttgatgctggatatacaccaagtgacctgtcggataaaaatcaatattaaatccattgatctcgacaattcgttctccgaaatgaggaatatacgtagccgttacagtaaaggtgctgcggtctcctgtcacttttacgctgatgcagttatcgtatccagattcagaagaggaaattttttcactgaagctgatgccgcgttcttttgcgacaccccccgcattgacctcgttaacagtagagtcaacgcgcggttttaaaaagcctgacagaagggcttttgtaatgaacgatgtttcaagtttagcaattgtgccttcatattgaatggcaacatcctgtactggttctttcatgcactgtgatacaaggctgccaatttttcctgcaatttgatggtagggcttaattttagcaaattcatcttttgtcatggcaggcaggttgatagctgacatgacaggcaggccttttgcgaactgcagaacttcttctgacacttgggcggcgacattgagctgtgcttctttcgttgatgctcccaagtgaggagtggcaatgactaatggatgatcaacaagtttgttgtcaactggcggttcaacttcaaaaacgtcaagagccgctcccgcaacatgcccgttttccaaagcttcgagaagtgctgcttcatcgataattccgcctcgcgcacagttaattaagcgaacgccttttttcgtttttgcaatcgattctttattcaataagccttttgtttcttttgttaaaggcgtgtgaacggtaatgatatccgcactttcaagcacttcttcaaatgtacggctgtttacgccgatttttttcgctctttcttccgttaagaaaggatcaaaaacgtgcacagtcataccgaatgctctcgcacgctgtgcaatttcacttccgattcggcctaatcctacaataccaagcgtttttccataaagctctgaaccgacataagctgtgcggttccactctctggatttcactgagatattagcctgcggaatgtgtctcattaaagaagagatcattgcaaatgtatgctcagctgtcgaaatggtgttgccgttcggagcattgatcacgattaccccgtgtttcgtagcctcatcaatatcgatattatcgacaccgacaccggctcttccgacaatttttaaagaagtcattttgttgaaaaggtcttctgttacttttgtcgcacttcgcaccaaaagagcatcaaaagtatgtaattcatcttctgcatctgctacgtttttttgaacgatttcaataaagtctgattcaataagtggctgtaaaccgtcgttgctcattttgtctgagaccaatactcgaaacatcgttagatttcctcctaaattgacaaactaaatatctgataatttaacatattctcaaaagagtgtcaacgtgtattgacgcagtaaaggataaaagtaaagcctaataaatcaatgatttgacagcttgcaggtaatatatataatttgaagcaattctctatacagccaaccagttatcgtttataatgtaattaaatttcatatgatcaatcttcggggcagggtgaaattccctaccggcggtgatgagccaatggctctaagcccgcgagctgtctttacagcaggattcggtgagattccggagccgacagtacagtctggatgggagaagatggaggttcataagcgttttgaaattgaatttttcaaacgtttctttgcctagcctaattttcgaaaccccgcttttatatatgaagcggtttttttattggctggaaaagaacctttccgttttcgagtaagatgtgatcgaaaaggagagaatgaagtgaaagtaaaaaaattagttgtggtcagcatgctgagcagcattgcatttgttttgatgctgttaaatttcccgtttccgggtcttccggattatttaaaaatcgattttagcgacgttcccgctattattgccattctgatttacggacctttggcgggtattgccgtagaagcgataaaaaatgttcttcagtatatcattcagggaagcatggccggagttcctgtagggcaagttgcgaattttattgcaggaacactctttatattgccgactgctttcttatttaaaaaactcaactcagcaaagggcttggctgtcagcctgcttttgggaactgcagcgatgaccattttaatgagtattttaaattatgttctgattcttccggcatacacgtggtttttacattcaccggcattatccgacagcgcgctaaaaacagcagtcgtcgcaggtatcctcccgtttaacatgataaaaggtattgtaattacggttgtattctcactaatttttatcaagcttaagccatggattgagcagcagcgaagtgcacatatccattaaataaaaaagctcccgttcgggagctttttttagttacttctattcaaatttaagcgggtcgccttcaaatggctcatccgccactttgatggaatcagtagggcatccttcaaatgcgtcaatcatatcttcttccagtacctcaggaacttcgacaacacctttgttttcatcaagcgttacgaacgcgatgccttcatcatcgtaatcgtaaatgtctggtgcagcagctccgcaagcgccgcatgcaatacatgtatctttgtctacgattgtgtactttgccatgaataaaacctcccagattgttcttggtggaacaaatggatcaatctttatatttaatcaatttaacacctattcctcttacttattgtaatgatgttgctgccacatttcaacagaaaaatgattgagaatgcttatcacataaggggttatctacataacatcccccttaatgatgactttaaacgtcgatttctgtttgaaatctgttaaaataaaaagagcaaatcaacgatttttgtcaggaagaatgtaggtggataggttgtcattaaattacttcgatattatggttctcgattgcctttgcaaaataaacggggaacggtcgggaagcgctgtttttcacctattcaaaggcaagagatcgtcacaaaccattcaagatgccggcttatttcagactgcaaaatactttggaatggcggcgcaatgttcgagaagcgatgtttctgagtcgcttgacaagcttgaaaagcattcatatctctcgccaatgtctgaaacagatacatacaaagtgacagccagcggcgcagcagttttaaggcatgcccttagcgagcggccttggcccgttcattgtcacggcgctcattatcagcaggctgccggtgtgctttggaaaaggctttcgctgcttgtgcaggtcctatcccataaacagcaagggagcaggcagtatatccctgtcacaaaggatcataagacacttcactgggtaaagaaatacctgtcccggcatacggatcatatagagatggcaaaaagcctttttgccatgcttgaggcgcatttgaaaaagattgaaaacaaagcagcgcaaatttttgtctactccttaacctcgcaccatcggatcggttatactagcaggcagcttgctgatacgctgaaagaagacgaatggtatgtctatatcatgttttgggcttcggtacattattttattcattctcttccggagtgtgaagatgctttgttaaaggatctcctttctgatgtgcacttagataatgccctgacagagtcgacgaggaaaacatggcagatggtcaaacaagggtttccgatacatcgaattgctgaaatcagaaagctgaaaacagcgacgattgaagaccacattgtcgagatttctctccatgagcctgcgtttatgattaatgattatgtatcagcagaagaccagctccaaatcgcagagtttgccaaacggatgcggacgaataaaatcaaacaaattcgcgacgggctggaacagcggttcagctactttcaaatcagactggcattgacaaagcaggtgcagcaatatgactaaattacagcaaacgttatatcagttttttggttttacttcctttaaaaaagggcagcaggacattattgaaagcatactcagcgggaaggataccattgcaatgctcccgactgggggagggaaatcgctttgctaccagctgcctggttatatgcttgacggcatggtattaatcgtttctccgctgctttctttaatggaggatcaggtgcaacagctcaaagcccggggggaaaagcgtgctgcagctttgaacagcatgctaaacaggcaggaaagacaatttgttttagaacatattcatcgatataaatttttgtacttgtctcctgaggctttacagtctccatatgtgttggaaaaattgaaaagcgtcccgatcagcctatttgttattgacgaagcgcattgtatttctgaatggggacacgacttcaggcctgattattcaaagctcggacagctgagaaaaaaacttggacacccgcccgttctggcattgactgccacggctacaaaggaaacgctgcaagatgtcatgaacctgctcgagctgcagtatgctgtacgccatctcaactcagtcaaccgcccaaacatcgcactgagggttgaaaatgcggcggatactgccgaaaaaatagatagggtcattcagctggttgaaaacctgcaaggtccgggaattgtttattgtccgacacggaaatgggctgaggaattagcgggtgaaattaaaagcaaaacgagcagcagagccgacttttaccatggcggtttggagtcaggggacaggattttaattcagcagcagtttattcataaccagcttgatgtgatatgttgtacgaatgcgtttggaatgggtgtcgataaacccgatatcagatatgtgattcattttcacctcccgcagacggcagaagcttttatgcaggaaatcggcagagcgggccgcgacggaaagccgagtgtcagcattttgctgcgggcgccaggggattttgaattgcaggaacagattatccagatggagagtgtcacagctgaagaaatcgccgacgtaatccgtgtcctagaaaagacggaggagcgggatgagagaaggctgcgtgacgtattacttcagtatggcgtcggagagacacaggcccgtatgatgattcatctctttatgcaggggaaaacatcagttgaactgatgaagaaagaaatttcatatcgcatggagctgaagctggaaaaaatgcaccgtgtatcatttttgcttcagcgtgacggctgtttaaggcaggcactgttaacctactttgatgaatcatacgagcctgatgacggaaacctcccgtgctgttcacattgcggttttgatttatccttgtatgaacaaaaaggggcacggagtaaaatggcgccattagacagctggagttcggaattgcaccggatattcagcttgcagactgtaggtgagctgaactgaaacagcaaaaagattatattcagcatatgactgaccgtgatatgctgaagcagttatatttgacgcagctactcatcatctttgccgctgctgcagcaggactgttcttttttgaggatgtacgggacgtattaaagctctgggacattcgcgatatgcgaatcatctggtatggtgtttctatagctgttattgttattttagccgatatggcagtaatgaaatggtttccgtctcatttatatgatgacggcggaatcaataaaaaaatattcagtaagaggtcaatccctcatattatatttttaacgcttctgattgctttcgcggaagaaatgttattcagaggagtgctgcagactcatatcggtttatgggcggccagccttatatttgccgctctgcactttcggtatttgtcaaaatggctgttatttattatggtgacagcaatcagctttttgctcggtctgatgtatgaatggaccggcaacttatttgttccgatgacggcgcattttatcattgatgccgtgtttgcctgtcagattcgttttgaacatgtgaggagggataaacatgacgaacatgtcgagagtagagagaagaaaagcccagaatctttatgaagatcaaaacgccgcattggcggacgattatgtcgatgatggagaaagccttccgacaagacaatctgtaaaaaatcaaagagaacagaaaaaaaaccaaggcaaaacaaaaacgccattattcacagtactcgcagtaatatttgtatttgtgccggttatcgttttagtcaccttattttatctaaagagccacccggataatcatgacgattatgaagatgtttttattgacagcagccaaagcaaatatgaggttgtcccgaaatcagaggataaaaacgataccgcagacactaaagaaaccgcactgcagaaggagtcaaaaaaagagccagaagattccaagccaaaagagcaaacagctgctgataagaaacagactgctgtagcggaaaaagaagactcggcaaataaggaggaagcaaccgccgcggctgcttcctcttcccaatcaacagtgcaacagcaagaacagcaacagcagccggctgagccagttcaaaatgtgccgaatcgcgttgtcaagcacaccgtccaaaagaaagaaacgctataccgcatttccatgaagtattataaaagccggacaggagaagaaaaaattcgggcgtataatcatctgaatggcaatgatgtttacaccggacaagttttggacatccccataatggatgaatagggtattttttttattttacgttcatatattgtagcaatgaaaatggacaaggtgtgaagcgtatggaatccttatggaatcagctggatcagtttacagacgcgccgaccaaacagatgctccaagcgctggtaaaacgaaaacaaaaattcgaaaattatgcagcacaatgccgcagatggcgatgggcttcacttatctgcctaggcttattatgtgttatgatcatgatcaaaagcccggagcctcagcttatacttcaagaaatacttagccataccttttatttattttggatgctggcaaccgcttttgcctactgcacttcatattattttaagaaaaaggaagaaaaatccgagactgatttccataaactgagatgtgaaattattcagaaaagcactgatctctggccgcagcctgataaatggaaggcgagagagtctgttttttacatgatgaagcacaaatatgacattaatctatattttgaaagtaaataaaatggggcgttttctcaaacgatagaaacgtcttttttttattgtccgtcttattgataagttctaaaaagaatggagagtttttatgaagctatcagtgaaaattgccggtgtactaactgttgcggcagcggcaatgacggcaaaaatgtatgcaacagcaaaaggcaatcatttgaagacacatacgtttcctttatcaaagatgaagggcaagcctcctctgacaatcttttttatttcagacattcacaaacgtctcatcgatcaagaccttttagaaaaagcgcgaagccatgccccccacttggttataatcggcggtgatttagctgagggcggggtgcccagtgcgagaatcgaggaaaacatcaaaaggctcgtacatttcggggtccctatcgtgtttgtgtgggggaataatgattatgaagtcaggcagcataagctgtattccatatttaaagcgcacggcgtcatcgctctgagaaatgagtcagtcccgttttcatacaatgggcatacgattgcgattgcgggggttgatgatatcaggatggagatggatcattatgaggaagccatcaaagaacttgatgaaagccagctgaatattctggtttgccataatccggagattcatgaacaaatcaatgaaaatgacggtattgatgtgatactcagcggacatacccatggaggccagatcaggtttggaaaattcggcccttatgaactggggaaaacaggtattgttaaaaacgcggcgtatctgatcagcaacggctacggcacgacaaaagtgcctcttcgtttaggtgctgagcctgaaacacacattgtgactctttgcgggccagaataacttctaaaaagcaaaaatccatatggcaataaaaactgcattgtgcttgtcttactagtgaactcagtgtaaactgataacaattaagaacctatgactcatcatctcatataatgtgttatatgatttgtgtgcaagtagaggcaggagggaacgttatgcggcttgagcgtctgaattataataagatcaaaatctttttaaccctcgatgatttgacagaccggggattgacaaaagaagacctctggaaggactcatttaaagtccaccagttatttaaagatatgatgaatgaagcaaatacagagctcggctttgaagcgaatggaccgattgcagtggaagtgtattctctccaagcacaagggatggtcgtgattgtaacaaagaaccaagacgtcgattcagaagacgatgagtatgatgatgattacatcgaaatgcaagtcaagcttgatgaaagcgcggacatcatatatcaattccattcctttgaagatatcattcagctttcagaaagcttacagcgaatcggtatcacagggggaactgtctaccactatgacgggcagtactttttaagccttgaagatctagggtcacatacggctgaaggggttgtggcggttctggctgaatacggcaatccgacaactttaacgatttatcgcctgcaagagtatggtaagctcattatggacggtaatgccgtagagacgatacaaactcatttttcataagaatgcaacggaaaactgctgatttcagcagttttttttcgttaaaaaacatggaaaaacataacgtttattctatgcacagatcatatgaaggtgtatactattctctgaaagggagcatgtgagaaacagaagattctaggaggttaactcaaatggcagccgatcgaaacaccggtcatacagaagaggacaaacttgatgtattaaaatcaacccaaaccgtaatacataaggctctggaaaaattgggatatcccgaagaggtatacgaattgttaaaagagccgatgagattattaacggtaaaaatacctgttcgtatggacgacggttcagtaaagattttcacaggatatcgtgcgcagcacaatgactctgtcggtccaacgaaaggcgggatacgttttcacccgaacgtaacagaaaaagaggtgaaggcgctttcaatttggatgagtttaaaatgcggcataattgatcttccatatggcggtggtaaaggcggaattgtttgtgatccaagggatatgtcgtttagagagctggagcgtctgagcagagggtatgtcagagcgatcagccaaattgtcggcccgacaaaagacgtgccggcaccggatgtatttacaaactcacaaatcatggcttggatgatggatgagtattcaagaattgatgaatttaattcgcctggatttattacaggcaaaccgcttgtgcttggcggatctcacgggagagaatctgcgacagcaaaaggtgttaccatctgtattaaagaagcggctaagaagagaggcatcgatattaaaggtgcgcgtgtcgttgtccaaggcttcggaaacgcgggaagctatttggcaaaatttatgcatgatgcgggggcaaaagttgtcggcatctcagatgcgtatggcggactttatgatccggaaggccttgatatcgattatttactcgaccgacgcgacagctttggtaccgtaacaaagcttttcaacgataccattaccaaccaagagctgctggagctggattgtgatattctcgttcctgctgcgattgaaaatcaaattacagaagaaaatgcccataatattcgggctaaaattgtcgttgaagcagcgaacggaccaacaacgcttgaaggaacaaagattctttcagaccgggacattctgcttgtaccagacgtgctggcaagtgccggtggcgtaacagtttcttattttgaatgggttcagaataaccaaggcttctactggagtgaagaagaggtagaagaaaaattagaaaaaatgatggtcaaatcatttaacaatatttatgaaatggctaacaaccgaagaattgacatgaggctcgctgcatatatggtcggcgttcgcaaaatggctgaagcttcgcgttttagaggctggatataagttgatgatttgcataaaaataaaaaatctcctatgataaaataggagatttttttattcggaaatagaaatataaagtgaaatgccaatcgcaggagttgacagaaatgattcaagaaaaagcaattattataggcggagggccttgcggactatctgctgccattcacctaaaagaaattggcattgatgccctcgtcatcgaaaaaggcaatgtcgttaacagtatttacaattatccgacgcatcaaacctttttcagctcaagtgaaaagctcgaaatcggagatgtggcatttattacggaaaacaggaagcctgtcagaattcaggctttatcgtattaccgagaagtcgtcaaacggaaaaacatccgtgttaacgcatttgaaatggtgcataaagtgacgaaaacggaaaataatacatttgttattgagacgtcaaaagagacctacaagacgccatattgtatcatcgccacaggctattatgatcatccaaactatatgaatgtacccggtgagaatttgccgaaagtatttcattattttaaagaaggccacccgtattttgataaagatgttgttgtcatcggcgggaaaaattcaagcgtggatgctgcccttgaactcgtgaaatctggggcgcgtgtcacagttttatataggggcaatgagtattctccaagcattaagccgtggattctgccggaatttgaagccctcgtcagaaacggtacaatccgtatggaatttggcgcgtgtgtcgaaaaaatcactgaggatgaagttgtgtatcgctccggagagaaagaactcattaccattaaaaatgattttgtatttgccatgacaggctatcatcccgatcatcaatttcttgaaaaaattggtgttgaaattgataaagaaacagggcgtccatatttcaacgaagaaacgatggaaacgaacgttgaaggtgtctttattgccggggttattgctgcgggaaacaatgcaaatgaaatatttattgaaaacggcaggtttcacggggggcatatcgcagcggaaatcgccaaaagagaaaaccattaaagatgaggagcatatgatgcattcgtatgctctttttgtttttttaagtgcagacagatgtaaaattttaaacaacatggtaggatagacgtaggaatataaaggaaagaggttgcctgatgtttgcaatcatctctgcaggaattgcccccggcatcgcgttattaagttatttttatttaaaagatcagtatgataatgaacctgtacatatggtgcttcggtcgttttttctcggggttgttcttgtatttcccatcatgtttatccagtatgtacttgaaaaagagaatgtaggaggcggaagttttttcgtttcttttttatcctcggggtttttggaggaatcattaaaatggtttatactgatgatcagtgtttacccgcacgcccactttgatgagcattatgacgggattgtgtacggtacaagtgtatcactcggttttgcaaccctcgaaaatattctttatttaattggccacggcgtagagcatgcgtttgtcagggcgctgctgcctgtttcatgccatgccttgattggcgttataatgggattttaccttggaaaagcccgtttttccgctgataaggcgcgtgtaaagtggcttactctttctttagttgtcccatcccttttgcatggatcatatgattttatcctaacagcgcttagcaattggatttattatatgcttccatttatggtatttttatggtggtttggtttgcgtaaagcgaaaaaagcccgttccgttaatatgatgcaagtatagaagccgcacagcaaccgtgcggcttttttgcgtgcagtttttacaaaagagttttgatgttctgagggataacaaggaaagagtgtataaaaataacctcgttacagaaaatacgattacacttaaaaatttgcagtaggaggcttgaaaagatgaagtccaaaggatcgattatggcatgtctcatccttttttcctttacaataacgacgtttttcaatactgaaaccatctctgccttttcgaatcaggtcattcaaagaggggcaaccggggacgatgtggtcgaacttcaggcgcgtcttcaatacaacggatattataacggaaaaattgacggggtttatggatgggggacgtactgggcagttcggaattttcaggatcaattcgggttaaaagaggttgacggccttgtaggagctaaaacaaagcaaaccttaatatgtaaatcaaaatactatcgtgaatatgtcatggaacaactcaataaagggaatacattcacgcattacggaaaaattccgctaaagtatcagacgaaaccatcaaaagcagcaacacaaaaggcaagacaacaagcagaagcacggcagaaacagcctgcggaaaaaacaacgcagcagcctaaagcgaatgcgaataaacagcaaaacaatacaccagcaaaagcaagaaaacaggatgcggtagcagcgaacatgcctggtggattttccaacaacgatatcaggctgcttgctcaagcggtttatggcgaagcccggggcgagccgtacgagggacaggttgctattgcagcagtcattttaaaccgtttgaacagcccgttatttccaaattcagtagcgggggttatttttgagccgcttgccttcacagcagtagccgacggacaaatttacatgcagccgaatgaaacggcacgagaagcagtgctggatgccatcaatggctgggacccatcagaggaagcactttactactttaatccggatacggctacaagtccgtggatttgggggcgtccgcagattaaaagaatcggtaaacacattttctgtgagtagcagatatgagaaagcataaaaagaggtgtgataaatgatcagaggaattttaatcgccgtgcttggtattgcaatagtcggtacaggctactggggatacaaagaacaccaggaaaaagacgcagttcttcttcatgctgaaaataactatcagcgggcgtttcatgagcttacctatcaggtggatcagcttcatgataaaatcggaacaacacttgccatgaacagccaaaaatcactgtcgcctgcattgatcgatgtgtggaggattacatcagaagctcataacagcgtcagtcagctgccgcttacattaatgccgtttaataaaactgaagagctattatcaaagatcggcgatttcagctataaaacgtcagtcagagatttggaccaaaagccgcttgataaaaacgagtatacatcactaaataagctatatcagcagtccgaagatatacaaaatgaattgcgtcatgttcagcaccttgtcatgagcaaaaaccttcgctggatggacgtagaaatggccctggcttctgacgaaaaacaaagtgataatacgattatcaacagctttaaaacagtcgaaaaaaatgttggtgcattctccactggcactgatcttggcccgagtttcaccagtacgaaaaaagaagagaaaggcttcagccatctgaagggaaaacaaatttccgaacaggaagcaaaacaaattgctgagcgctttgccccagatgacaattattcaattaaagtggtaaagagcggaaaaaaaacaaatcgcgatgtatatagcatcagcatgaaagacccagaccataaagcagtgatttatatggatattacgaagaagggcgggcatccggtatacttgatccaaaacagggaagtgaaagatcagaaaatcagtttaaatgacggatcgaaccgagcgcttgcatttttaaagaaaaacggatttgaaacagatgatttgcaaattgatgaaagtgcccaatatgataaaatcggtgtattttcatatgttcctgttgaaaataaagtccggatgtacccggaggcaattcgtatgaaagtggccttggatgacggtgaggttgtcggcttttcagcaagagacttcctcacatctcacagaaaaagaaccatacctaagcctgcaattactgaagcagaggcaaagtctaaattaaataaaaatgtacaagtgagagaaacaaggctcgctttgattacaaatgaactaggtcaagaagtgttatgttacgaaatgcttggaacaattgaaaatgacacattcagaatgtatatcaatgccaaagacggatcggaagaaaaggttgaaaaactaaaaaatgcagaacctatatataaagacctataaaaaataggaggaaaggactaaatgtcttttcctttttttcattacgtgctttaataaaaacgtgagtatattgaatgcgaaagagtgaagtcaatgatagagattggagaaactgtacttttagaatatatagaagaaaatgaattgaaaaaggcaaaaagcaaggcggtcagcatcgaaaacaatgaacttttgatcgcgtatcctgttgatgtagttacagggcgaactgtgattttacataacgatatggaagtaatggtagagtttgtgggaaaagacgaagttccttatcgctttataagccgtataaaaggtaaagtgaaggacaaacttcaaatgatctgtcttgaagtgcctccacgtgaaaaaatgaaaagaatccagcgccgccaatatgtaagaactgatgccgtattagatgtgcaaattcagccgggaaatgaagaagagatccgcacactatcttataacatcagtgcaggcggcatcgccgtggttttagctgatggcctttcttttcaatcgggggaatcattgcgcctgatcatccgtcttcctgaagaggagcacacacgtcaaatagaaacagaagcagttgtcagacgaatctttaatgaccccaagtcaggaaaacgcaaaatgactttagagtattcagaaattgcagcaggtgaccagcaggctttgcttcaatactgcatccggcgccagttaaataagagaagaaaggcccgaatggaataaacatcggcaaacacttccatactatttgtaatggaggtgctccaatgaaaacatttgaacggctgctgatcaaattattgttcattcaggccatcattttacttggtgtccaatttctttttcactatcagcatattgaaccatacgtatcaaaagtgattcaatatgaaggggtggataaaatggaggaaaacaataggattgaaaccttcaaacattaattattcatcaatttttcaccctttttcatatagttcgtgatacaatccatagaggagaaaagagcaaggagaggaattatggaaaagaaattatcgattgcaatcgacggcccggcagctgcggggaaaagcaccgttgccaaaattgtggctgagaaaaaatcgtacatatatattgatacaggagcgatgtatcgggcgattacgtacgcggctttacaggaaaacgttgatctgacagatgaagaaaaactggctgagctgctaaagcggacagacattgagctgattacaacaaaagatggacaaaaagtgcttgtaaacggcaccgatgtaactgaggcgatcagaacagatgaagtcagcaaccaagtttcaattgcggccaagcacagaagtgtcagagaagaaatggtgaaacgccagcagcagcttggggaaaaaggcggcgtcgtcatggatggtcgtgacatcgggacgcatgtgctgccaaatgcagaagtaaaaatctttcttttggcatctgttgaagagagagcgaaacgccgttatgaagaaaatgtgaaaaaaggctttgatgtcaacttcgaaacattaattgaggaaattgcaagaagagacaagcttgattcagagcgcgaagtatctccgctgcgtaaagcagaagacgctcttgaaatcgacacgacatcgctttccattcaagaggtagctgataaaatcctcgaggctgtggagcaaaagtcccgctgaggatggcaaatgccactttttttgaatttttcaacgaagatagaatgttattgcttgacaaacctgtccttttattagaagttaatactaataaaactttttattgatcattcaaaaaacttttttggatgattctttaatacatattcggctaaaagcgggcatgttatatgttcagctttcaaaccgttttaattaagctgtgtaggtttggaccaaggaggttattcaaatgacagaggaaatgaatcaaattgatgttcaagtgccagaggttggagatgtagttaaagggattgtgacaaaggtagaagacaaacatgtagatgtagaaattatcaatgtcaaacaatccggtattattccaatcagtgaattatcaagtcttcatgtagagaaagcatcggatgttgttaaagtagacgacgagcttgacctgaaagtaacaaaagtggaagacgatgctttgattttatctaaacgtgctgttgatgcagaccgcgcttgggaagaccttgagaaaaaatttgaaacaaaagaagtgtttgaagctgaagtgaaagatgtcgtgaaaggcggccttgtcgttgatatcggcgttcgcggttttattccggcatcacttgttgaagcacatttcgttgaagacttcactgactataaaggaaaaacactgtcactgctcgttgtagagcttgaccgtgataaaaaccgcgtgatcctttcacaccgtgctgttgttgaaagtgaacaagcgaataaaaaacaagaacttcttcagtctcttgaagttggaagtgtacttgatggcaaagtacagcgcctgactgattttggcgcgtttgttgatattggaggcatcgacggacttgtacacatttcacagctttcccactctcatgtagagaagccgtctgacgttgttgaagagggacaagaagtaaaagtgaaagtgttatcggttgaccgtgataatgaacgtatttctttatcgatcaaagatacactgcctggaccttggagccaaatcggcgaaaaagtgaagcctggcgatgtgcttgaaggaactgtacagcgtcttgtaagcttcggtgcctttgttgaaatccttccaggtgttgaaggtctcgttcatatttctcaaatttccaataaacacatcggcacgccgcatgaagtccttgaagaaggacagactgtaaaagtgaaggtacttgatgtgaatgaaaatgaggagcgcatttcattaagcatgcgtgaacttgaagaaacgcctaaagctgatcaggaagattaccgtcaatatcaagcgaaggaagaaacaagcactggcttccagcttggagatctgatcggagataagctgaataaactaaaataattggtgataaacgtgactcgagcagaacgaaaaagacaacacatcaatcatgccttgtccaccggccagaagcgggaaacaggtcttgatgatattacgtttgttcacgtcagtctgcccgatcttgcattagaacaagtagatatttccacaaaaatcggcgaactttcaagcagttcgccgatttttatcaatgcaatgactggcggcggcggaaaacttacatatgagattaataaatcgcttgcgcgagcggcttctcaggctggaattccccttgctgtgggatcgcaaatgtcagcattaaaagatccatcagagcgtctatcctatgaaattgttcgaaaggaaaacccaaacgggctgatttttgccaacctgggaagcgaggcaacggctgctcaggcaaaggaagctgttgagatgattggagcaaacgcactgcagatccacctcaatgtgattcaggaaattgtgatgcctgaaggagacagaagctttagcggcgcactggaacgtattgaacaaatttgcagtcatgtcagtgtaccagtcattgtgaaagaagtcggattcggtatgagcaaagaatcagcaggaaagctgtatgaagctggtgctgcagctgttgacattggcggttacggagggacaaatttctcgaaaatcgaaaatctccgaagacagcggaaaatctccttttttaactcgtggggcatttcgacagctgccagtttggcggaaatccgctctgagtttcctgcaagcaccatgatcgcctctggcggtctgcaagatgcacttgacgtggcaaaggcaattgcgcttggggcctcttgcaccggaatggcagggcattttttaaaagcgctgactgacagtggtgaggaaggactgcttgaggagattcagctgatccttgaggaattaaagatgattatgaccgtgctgggcgccagaacgattgacgatttacaaaaggcgccccttgtgatcaaaggtgaaacccatcattggctcacagagagagggatcaatacatcaagctatagtgtgcgataaatgataaaagcccaaaaccatatgtggtttgggctttttgtattatgattttcgctttttgaatcttccgttttgttcaaggcttgtcgctccgtcatagtgaatggactggtcgcggtctgattcgactctgcctgaagctttgagttttttctcttgtctgtcttttcccatgatcatactccttaatgtgagatcgattgtttaaaaaatgtgcttgaactccatactgggaatatggaggagtaaaatggaacaattttattactattggtcaatgtggtttctgtgggttctgacaacatttatttttgaaaagacgaaaagacgaattgccgtctctgtctttattttaactaatattattctaagcatacatgacatcgctttatatttttccctgaatgttgcatatttgatgtttttcgtttgcggatgtgtctatgccgggtatttgggaatgtatcgttttcgttacatcatggtctatctgacgctcgttgccgcgtatgcgtttgtttatctttttgcattatatgacccggtttggttcatcataaaacctgagtgggctgctgttatattaatagtgcttttaacagcttctgttgaaaggaattttgagaagcagcttgtcttatttgtcctagggatgtgccaaggcgaactggtgtattcatttgtgatccagaagttggccggggctatggctgtcggcggctttcaatggctgaatgcgtgttctgcgggaatgatattgctgtttggcatatctaaatacgaacacctcgcaagccagattggtcagaaaagcaaaagatcaaacaaaggagctaccaaaatgtcatgagtgattacatctatccgattattgctggggtcattgccggaattgcgacaaggctttatatgctgaaaacggattaccgccagtatccgacctatgttcatgggaaagtgattcacatcgcactggggttgatagcggctggtttaggtgcaattattatgccggcgcttttgcaggaggaatttacggccatcacatttttaacattggcagcgacgcaatttagagatgtccgaaacatggagcggaacacattgacgcaaatggattcgtatgaacttgtctcaaggggaagcacatatattgaggggattgccattgcgtttgaaagcagaaattatattgtgatctttacagcgcttttgacaacctctgcgtatgtgtttttatccatctgggctgctgtcatagcggctgtcgtttgttttttactggctatgaagtttatgtcgggcagtgtgttgaaggatattgtagatatcgagtacataaagccgcgctttgacggtccgggactgtttgttgataatatttatatgatgaatatcgggcttccagagaaacaggaactgattttaaagcatggcatgggctttattttgacgccgaaaaactttaattcagcagcgacgatagcaaatttagggcagcgtcaggccattttatttgatgtttccaatgtgctcggggtttatcgggattcaggagaaccatctttgacaccaattgcaaaacgggatttaaatgatgggagagtggcagtatttgttcttccgcaaattcaccatcccgaaacggctgttcaaattattagcaatgttccaaccctggaaaatgcgattagaatgccgactgaatttatcaagaatcaggataaggtgataggatgagtgaatctcttacgaaagtgattttgtctgtaatcacgacaaatccaaacagggttgcagggggagcacctgtctttttttgcaatgaccaaaaggagatggagcttttcgctaaaaatcttgaggcgatccttgatggaatagctcacagaatcggagatgacgtgtatttgatcgtgaaacatttttaagaatagttgtgatcccagtaaaaactgatataataaatgagttaagcccttcctctgaagggtttcttttcataaaagtgaatgaaatgattttaataaccggttgaaaatttatgtaaaaatgaaagcggctggattgaaaggaagggtactatgggtaaacctgtcgtagccattgtcgggagaccaaatgtaggaaaatccacaatctttaaccggattgcgggagaaagaatttcaatagtagaagatacccctggcgtgacaagggatcggatatacagctcggctgaatggctgaattatgattttaatttgattgatacgggcggtattgatatcggtgatgagccgttcttagcgcagattcgccagcaggctgaaatcgccatggatgaagcggacgtgattatttttatggtgaacggccgtgaaggtgtgacagctgctgatgaagaagtggcgaaaattttgtaccgcacaaaaaagcctgttgttttagcggttaataaactggataacacagaaatgagagcgaatatttatgatttttattcgctaggctttggcgagccgtatccaatttcgggaacacacggactcggactgggtgatttactggatgccgttgcagagcattttaaaaacattccagaaacgaaatacaatgaggaagttgttcaattctgtctgatcggacgtccgaatgtcggaaagtcttcacttgtgaatgcgatgctcggcgaagaacgcgttattgtcagcaacgtggctggaacgacaagagatgctgttgatacgtcatttacttacaaccagcaggagtttgtcattgtcgatactgcaggtatgcgaaaaaaagggaaagtctatgaaacgactgagaagtatagtgtactgcgggcgctaaaagcgattgaccgctcagaagtcgtggcggttgtgctggatggcgaagaaggcattattgaacaggacaagcgcatcgccggttatgcacacgaagcgggcaaggccgtcgtcatcgtcgtaaacaaatgggatgctgttgacaaagatgagagcacaatgaaagaatttgaagaaaatattcgcgatcattttcaatttctggattatgcgccaatcctatttatgtctgccttaacgaaaaaacggatccatacgctgatgcctgcgattattaaagcaagtgaaaatcattcacttcgagttcagacgaacgtcttaaatgatgtcatcatggatgctgtggcaatgaacccgacaccgactcataacggttctcgtttgaaaatttactatgcgactcaagtgtcggtaaagccgccaagcttcgttgtgtttgtaaacgatccggaattgatgcatttttcatacgaacggtttttagaaaaccgaatcagagacgcgttcggttttgaggggacaccaatcaaaatatttgcaagagctagaaaataaaaaggtgtgaatcaaacatgaaaaaagtcacaatgcttggagcagggagttggggaacagcactggctttagttctaactgataatggaaatgaagtgtgtgtgtgggctcaccgtgcagatttaattcatcaaattaatgagttgcatgaaaacaaagattatttgccgaatgttaagctgtctacatccattaaaggaacaacagatatgaaagaggctgtttcagacgcagatgtcattatcgttgcggtcccgacaaaagcaattcgggaagtgctgagacaggctgtcccttttataacgaaaaaggcagtctttgttcatgtcagcaagggtattgagccagattcacttctgcgcatttctgaaattatggaaattgagctcccgagtgatgtcagaaaagatatcgttgtcctttccggcccgagtcatgcggaagaagtagggttgcggcaccccacaactgttactgcatcttcaaagagcatgagggcagcagaagaggtgcaggatctatttattaatcacaattttcgggtgtacacaaatcctgacattatcggagttgaaatcggaggggctttaaaaaatattattgcccttgctgcaggaattacagatggtttagggtacggcgacaatgccaaagctgctttgattacacgcggacttgccgaaatcgcgagactcggaacgaaaatgggcggaaatcccttgacgttctctggattgacaggagtaggcgatctgattgtgacgtgcacaagtgttcattccagaaactggcgtgcgggcaatttgctcggaaaagggtacaagcttgaagatgttcttgaagagatgggaatggtagtcgaaggcgtccgcacgacgaaagcggcttaccagctttcgaagaaatatgatgttaaaatgccgattacagaagctctccatcaggtcctattcaacggacaaaaagtggaaaccgctgttgaatctttaatggcgagagggaaaacccacgagatggaggatttggtaaatacgtttgaaaatcaagtgaagtaaaagtgtcaatcgtatgatgaaacgcatatcttaattgaacgaaagcccgaaaaacagaagaacacccaagtcttgggatctcctgaaacattttgccgatttaggcaatagaggatgcatctgtatgccaagtcgcatactatagcatcgaagtccaagagagtgtttcttaaacgtgcaggtgaatatagtcaagttgactgaagcgaaggtccccctctttgcttcagtttttttgttctatcaaaggatggaaaatccggttgatcttttccggcgctgtatattaaaatataatataacgcttacatcatacatatcggggaggcgcacgtcattgaatctggcattgatgaaaatgtggtttgcactagggtccatgggtctgatgtttctggctgtagcttccatctatttaagccgctttaagtgccaaaaccgttttttgaagattacgatttcatcattcgcatacatgtgtatgctcatatctggaattattgtgtttgtcgtggtttttagcggccctgtcaatgaataaagctgtaaaaggaagtgctgtatgggtaaactgaagtgcgcaatcatttttgcggcagtcgtgtttttatccggatgtttatatccaaatgaacggaaaagcagtgtgcatgccattccttatcaagaccagctaaagcaggttcaatctgctgttgatgaatttcaaaaggcaaatggagggctgcttcccattcaaacaaaagatatgtcgacaccgctatatcaaaaatatccgatagactttaaccggttagcgccaagatacatagctgaacctccaagtacggcatttgaaagcgggggagactatcaatacgtgcttgttgacgtagagaacgatccgactgttaaattaattgatctaaagatggcagaaaaaattcgcgatgtgaaattgcgcatccaaatgtatcgtcaggagcatcaatatccgccttacaaggatgtgctatctcgcgatttatttacactcgatgagaagaagcttggggatggaagctctcttacagtgacaagcccaatctcagggaattccttgccgcttatgattgacggagacggagaaatatatgctgattaccggactgagctgacttcttgcctcaaaaaaagcaaaaaaacgtttaaacccgggactgaaatccaggatatgatttgggaggaaaccccctttgtccccgcgttttctgtaaaatatacggtaaatgacaaacaggaacctgtttttttagaaaatgatatgaaaaaggaatgaacctttctcccttgcatacaaatagggagaaaggtttttttatattaatagattgaggatgagaaattttctaaagatgtcatattcaaataggacaacgtcatacacatatagtgtcctgtgtttgattgaaagagcttaataaaattgaaaaggataggaagtccgggaggggatcacttggaaaaggtcgatattttcaaggatatcgctgaacgaacaggaggcgatatatacttaggagtcgtaggtgctgtccgtacaggaaaatccacgttcattaaaaaatttatggagcttgtggtgctcccgaatatcagtaacgaagcagaccgggcccgagcgcaggatgaactgccgcagagcgcagccggcaaaaccattatgactacagagcctaaatttgttccgaatcaggcgatgtctgttcatgtgtcagacggactcgatgtgaatataagattagtagattgtgtaggttacacagtgcccggggctaaaggatatgaagatgaaaacgggccgcggatgatcaatacgccttggtacgaagaaccgatcccatttcatgaggctgctgaaatcggcactcgaaaagtcattcaagaacactcgaccatcggagttgtcattacgacagacggcaccattggagatatcgccagaagtgactatatagaggctgaagaaagagtcattgaagagctgaaagaggttggcaaaccttttattatggtcatcaactcagtcaggccgtatcacccggaaacggaagccatgcgccaggatttaagcgaaaaatatgatatccccgtattggcaatgagtgtagagagcatgcgggaatcagatgtgctgagtgtgctcagagaggccctctacgagtttccggtgctagaagtgaatgtcaatctcccaagctgggtaatggtgctgaaagaaaaccattggctgcgtgaaagctatcaggagtccgtgaaggaaacggttaaggatattaaacggctccgggacgtagacagggttgtcggccaattcagcgagtttgaattcattgaaagtgccggattagccggaattgagctgggccaaggggtggcagaaattgatttgtacgcgcctgatcatctatatgatcaaatcctaaaagaagttgtgggcgtcgaaatcagaggaagagaccatctgcttgagctcatgcaagacttcgcccatgcgaaaacagaatatgatcaagtgtctgatgccttaaaaatggtcaaacagacgggatacggcattgcagcgcctgctttagctgatatgagtctcgatgagccggaaattataaggcagggctcgcgattcggtgtgaggctgaaagctgtcgctccgtcgatccatatgatcaaagtcgatgtcgaaagcgaattcgccccgattatcggaacggaaaaacaaagtgaagagcttgtacgctatttaatgcaggactttgaggatgatccgctctccatctggaattccgatatcttcggaaggtcgctgagctcaattgtgagagaagggattcaggcaaagctgtcattaatgcctgaaaacgcacggtataaattaaaagaaacattagaaagaatcataaacgaaggctctggcggcttaatcgccatcatcctgtaataccggtagacctctttatagaatgggaggtcttttttctttgctcttaataatggaaaaggatcaaggaataggatgaaaaaaggaaaaaaaggaatatttgttcggtaaatcaccttaaatccttgacgagcaagggattgacgctttaaaatgcttgatatggctttttatatgtgttactctacatacagaaattcttcactttgttggacaaacattcctcagagtgcagtttttcttaaaaagccgtttaattgtctttctcttacttgctctcatttttttctgagacaggtttagaatcagactgaactgtgaagaaatgataataaacgaactgaatgtatccttttgggaggaggtgaaaggcatgaacaaaacagaacttatcaatgcggttgcagaagcaagcgaattgtctaaaaaagacgctacaaaagcagttgactctgtttttgatacgatcttagatgcacttaaaaacggtgataaaatccaactgatcggttttggtaacttcgaggtgcgtgaacgttctgcacgtaaaggacgcaatcctcaaacaggtgaagaaatcgaaattccagcaagcaaagtacctgctttcaaaccaggtaaagcgcttaaagacgcagttgccggaaaataattgtgaatatagatcgtgtatgcatctagcttacatacactttatttcttcacagaaaagcccctttctaaggggcttttcatatttcaagagcatgggcttcctgacagggcattcactttgcttttagcggggcatatgtgctagaatcgaaattaaatgtattcattggtggaggacatagaacatgaaagaagttaataaagagcaaatcgaacaagctgttcgtcaaattttagaagcgatcggagaagacccgaatagagaagggcttcttgatactccgaaaagagtcgcaaagatgtatgccgaagtattctccggcttgaatgaagatccaaaagaacatttccagactatcttcggtgaaaaccatgaggagcttgttcttgtaaaagatatcgcgtttcattctatgtgtgagcatcaccttgttcccttttatggaaaagcacatgttgcatatatcccgcgaggcggaaaggtcacaggactcagcaaactggcacgtgccgttgaagccgttgcaaagcgcccgcagcttcaggaacgcatcacttctacaattgcagaaagcatcgtagaaacgcttgatccgcatggcgtaatggtagtggttgaagcggaacacatgtgcatgacgatgcgcggtgtaagaaaaccgggtgcgaaaactgtgacttcagcagtcagaggcgtttttaaagatgatgccgctgcccgtgcagaagtattggaacatattaaacgccaggactaataaagatagagggtgctataaatgaaccaaaagcattcaagtgattttgtcgtcattaaagccgttgaggacggagtgaatgtgatcggcctgacaagaggaacagacacaaagtttcaccattccgaaaaactcgacaagggagaagtgatcatcgctcagtttacagagcatacttctgccattaaagtcagaggagaggcactgattcaaaccgcgtacggagaaatgaaaagcgaaaaaaaataagctggctgtccccgctgttaaaagcaaatgctcgcaaacagcgggaggatacagccaatttcttttttttatgctataatgatacctgcgtaagcgaatgaaaagataaaactcatacatagattaagaaataaatgtgaatttggggacaagggtgatatttttgcaagacatctacggaactttagccaatctgaacacgaaattaaaacaaaagctgtctcatccttatttagcgaagcatatttccgcgccgaaaattgatgaggataagcttcttctttttcatgctttatttgaagaagctgacataaaaaacaacgacagagaaaattatattgtaacagcgatgcttgtacaaagcgcccttgatacccatgatgaagtgacgacagctagagtcataaaacgagacgaaaacaaaaaccgccaattgactgttctcgcgggcgattatttcagcgggctgtactactctttactatctgaaatgaaggatatctacatgattcggacgcttgctacagccattaaagaaatcaacgaacataaaattcgtctgtatgaccgttctttcaaggacgaaaacgattttttcgaaagtgtcggcatcgttgaatcagctttattccatcgtgtggcggaacacttcaaccttccgcgctggaaaaagctgtcgagtgatttttttgtatttaagcggcttatgaacggaaatgatgcatttctggatgtgatcggcagttttatacagctgggaaaaacaaaagaagagatattagaagattgttttaaaaaagcgaaaaacagcattgagtcacttctgcctctaaattcacctattcagaacattttaataaaccgtctgaagacaatcagccaagatcaaacctatcatcagaaagtggaagaagggtaaaccattatgcaggactcaaaagaacagcgcgtacacggagtatttgaaaaaatatataaaaactatgaccaaatgaactctgtcatcagttttcagcagcataaaaaatggcgcgacaaaacgatgcgcatcatgaatgtaaaagaaggcgcaaaagcacttgatgtctgctgcggaacggctgactggacgatcgctcttgcaaaagcggccggcaaaagcggcgagatcaagggcttggatttcagtgaaaatatgctgagtgtcggcgagcagaaagtaaaagacggcggattcagccaaattgaactgctgcacggaaatgcgatggagcttccttttgatgatgatacatttgattatgtcaccattggcttcgggctccgcaatgtccctgattacttgactgtactgaaagagatgagacgtgtagtgaagccgggcgggcaggtggtatgtctggaaacgtcccagccggaaatgatcggattcagacaggcttactttatgtactttaagtatattatgccgtttttcgggaaactgtttgcgaagagctataaagaatattcttggcttcaagaatcagccagagatttccctggaatgaaggaactggcaggcctgtttgaagaggcgggcctgaaaaatgttaaatatcattcgtttactggcggagtcgctgccacgcatatcggatggaaatgaaaacacagatgtttgggtgaatgatatgaaatttaaaatggcctactcttttttaaatgacgatattgatgtaatcgaaagagaacttgaacaaaccgtacgttccgattacccgcttttaagcgaggcaggtcttcacctgctgcaggccggagggaaacgtattcgtcctgttttcgtgctgctttctggcatgtttggcgattacgatattaataagattaaatatgtcgccgtcactctggaaatgattcacatggcatctttggttcatgatgatgtcattgatgatgcagagcttcgccgaggaaaaccgacaatcaaagcaaagtgggacaatcgtattgcgatgtacacaggcgattatatgcttgcgggatctcttgaaatgatgacgagaattaacgaaccgaaagcccataggattttgtcacagacgatcgttgaagtttgtctaggggaaattgagcagatcaaagacaaatataacatggaacaaaatctcagaacgtatctccgccgtatcaaaagaaaaacagctctcttgatcgcggtcagctgccagcttggtgccattgcgtctggagctgatgagaagattcataaggcattgtactggtttgggtattacgtcggcatgtcttatcagattattgatgatattcttgattttacttcaactgaagaagagctgggtaaacccgttggaggagatttgcttcaaggaaacgtcacattgccagtgctgtatgccctgaaaaatcctgcattaaaaaaccagcttaaattgattaacagtgagacaacgcaggagcagcttgaaccaatcattgaagaaatcaaaaaaacagatgcaattgaagcatctatggcagtaagcgaaatgtatctgcagaaagcttttcagaaattaaacacgcttccacgagggcgcgcacgctcgtctcttgcagccatcgcaaaatatatcggtaaaagaaaattttaatttttgtagatattaagaaatttctccgccccggattgattaattatcagaaagatgttacgatttcggtgtgcagtgtgaaagcctatacatacataatgatggggtggagaatatgatggaaaagacttttatcatggtgaaaccagacggtgtccaacgtcagctcattggggacattttatctagattcgaacgtaagggcttacaattagctggcgccaagttaatgagagtgactgaacaaatggctgagaaacactacgccgaacatcaaggaaagcctttcttcggagagctcgttgagtttattacttcaggaccagtattcgcaatggtgtgggaaggcgaaaatgtcattgaagtgacgagacagctgatcgggaaaacaaaccctaaagaagctttacctggtacgattcgtggggattatggcatgtttgtcggaaaaaacatcatccacggctctgattctctcgaaagtgcggaacgcgagattaacattttctttaagaatgaagaattagtatcatatcagcagcttatggcaggctggatctattaatcattgtgaaaataagtaacagagccggcatcatataacgccgccggtttttgatctgttttgtaaaggtttacattaaagtgaataaagggttgattggcagtgtgcatcagacctctgcctttcccaacgatctaaaatcagctgaaaagctgatttttttattgaaacaatacaatttcctgataaaacaagctatactaggacaaaaagacagcgagactgggagagtagagatggatacatacagcgtatttacaacaaaatggaaacaattaaccggagtcgatttgacactatataaagaagcacaaatgaagagaaggctaacgtcactttatgagaaaaaggggttccaaagctttaaggactttgcggcggcattggaaaaggatcaagctctcttaaatgaaacattggacagaatgacgatcaatgtttcagaattttatcgtaattataaaagatgggaagttcttgagactgcaattctgccgttaatcaaaacctctaggcctttaaagatttggagtgccgcctgctcaacgggtgaggagccatacacgcttgccatgcttttggaccagcaaaaaggtcttccgggctatcagattttggcgacggatattgatgaaaaagctttggaaaaagccaaaaaaggcgtttatcaggagcggtctttacaggaagtgccgctatctgtgaaagatcgttattttacgcaaaacgcaaatagaagttatgaagtgaaaacggaaatcaaaaagaatattacattcaaaaagcacaatttgctggcggatcgttatgaacaagactttgacttaatcgtgtgccgcaatgtatttatttattttacagaaagcgcgaaggaagagctgtatttaaaaatggcacatagcttgaagaagaatggagttctttttgtcggcagcactgagcaaatcttcaatcccgagaaatttggcctagtcccagccgatacattcttttatcaaaaaagatagactgactttttgctgaaaaatatgttatagtagtcttacttaaaagcgttaatgcgatgaagggagaagaagtcatgagatatttaacagccggagaatcacacggcccccaactgacaaccattattgagggtgtacctgccgggctttacataacggaggaagatatcaattttgagcttgccagacgccaaaaaggacacggccgcggccgccgcatgcagatcgaaaaagaccaggccaaaattatgagcggggtgcgtcatgcacgtacactcggttcaccaattgctctcgtagttgaaaataacgattggaagcattggacaaaaatcatgggcgccgctccaattacagaagatgaagaaaaggaaatgaagcgccagatttccagacctagacctgggcacgctgacttaaacggtgcaattaaatataatcatcgtgatatgagaaatgtgcttgagcgttcttcagcaagggaaacaactgtcagagtggcggcaggggctgtagctaaaaagattctttctgagcttggcattaaggtggcgggccacgtgttgcaaattggcgctgttaaagctgaaaaaacagaatatacgtcaattgaagacctgcagcgcgtaacggaagagtctcctgtcagatgctacgatgaagaggcaggcaaaaaaatgatggctgccattgatgaagcaaaggcaaacggagattccatcggcggaatagtagaagtcattgtcgagggaatgccggtaggcgtgggcagctatgtccattatgaccgcaaactggatagcaagcttgctgccgctgtactgtcaattaatgcatttaaaggtgtggaattcgggatcggatttgaggcggcaggccgaaatggaagcgaagtccatgacgagatcatttgggacgaggaaaaaggatacacccgtgctactaacagacttggcggactggaaggcggcatgacgacagggatgccaatcgttgtccgcggagtcatgaagccgattccgactttgtataaaccgctgaaaagtgtcgatattgaaacgaaagaaccgttttccgccagcattgaacgttcagacagctgtgctgttcctgcggcaagtgtagtcgctgaagcggctgtcgcttgggaaattgcgaacgcagtcgttgaacaattcggattagatcaaattgaccgcattagagaaaatgtggagaatatgagaaaactgtcgagggaattttaatgaagacactgcatgttcaaactgcttcctcgtcatatcctgtttttatcggacaaggtatcagaaaaaaggcttgcgaactattaacctctttaaacaggcctttaacaaggattatgcttgtcacggatgaagaagtggaccgcctgtatggtgatgaaatgctccatttgctgcaagataaatggcctgtgaaaaaagtgacggtaccgagtggagagcaggcaaaatccatggacatgtacacaaaattgcagagtgaagcgattcgttttcatttggatcgctcctcatgcatcatcgcattcggtggcggtgttgtaggggatcttgccggttttgtggctgccacttttatgcgcggcattgatttcatccaaatgcctacgacgctcttggcgcatgacagcgcagtcggaggaaaagtagccgtgaaccatccgcttggaaaaaatctaatcggtgcgttttatcagccgaaagccgtgctctatgatacagatttcctgcgttctctgcctgaaaaagagcttaggtccggaatggcagaagtgattaaacacgcttttatctatgacagagcgtttctggaggagctgctgaatatccactcactgcgtgatatcactaatgatcagatgaatgacatgatttttaaaggtatttcaattaaagcgtctgtcgttcagcaggatgaaaaagaagaggggataagagcttacttaaacttcgggcacacgctcggtcatgccgttgaggcggaatatggatacgggcagatcactcacggtgatgccgtagccctcggaatgcagtttgctttatatataagcgaaaagactgtaggctgtgaaatggacagaaaacgtttggtcagctggctaaaaagcctgggttatccaagtcaaatcagaaaagagacggaaacttcggttctcttggaccgtatgatgaatgataagaaaacccgtggcgggaagattcagtttattgtgctcaacgaattagggaaagttgctgagcatacattttccagaaatgaacttgagagctggctgaacaaatggcgattggaggagacatcatgatgattcgcggaattcgcggagcaactacagttgaacgggatactgaagaagaaattttacaaaaaactaaacagctgttagagaaaatcatagaagaaaatcatacaaaaccggaagatgttgttcaaatgcttctgtcggctacacctgatttgcacgctgttttcccggcaaaagctgttcgcgagctttcaggatggcagtatgtaccggtaacatgtatgcaggaaatggacgtaacaggcggtctgaaaaagtgcataagagtcatgatgacggtccagacagatgtccctcaggatcagatcagacatgtatatttagaaaaagctgtcgtattgaggcccgatttatcattgacaaaaaatactgaattgtaatacgataagaacagcttagaaatacacaagagtgtgtataaagcaattagaatgagttgagttagagaatagggtagcagagaatgagtttagttgagctgagacattatgtttattctacccaaaagaagtctttcttttgggtttatttgttatatagtattttatcctctcatgccatcttctcattctccttgccataaggagtgagagcaatgaatttccaatcaaacatttccgcatttttagaggacagcttgtcccaccacacgataccgattgtggagaccttcacagtcgatacactgacacccattcaaatgatagagaagcttgacagggagattacgtatcttcttgaaagcaaggacgatacatccacttggtccagatattcgtttatcggcctgaatccatttctcacaattaaagaagagcagggccgtttttcggccgctgatcaggacagcaaatctctttacacaggaaatgaactaaaagaagtgctgaactggatgaataccacatacaaaatcaaaacacctgagcttggcattccttttgtcggcggagctgtcgggtacttaagctatgatatgatcccgctgattgagccttctgttccttcgcataccaaagaaacagacatggaaaagtgtatgctgtttgtttgccggacattaattgcgtatgatcatgaaaccaaaaacgtccactttatccaatatgcaaggctcactggagaggaaacaaaaaacgaaaaaatggatgtattccatcaaaatcatctggagcttcaaaatctcattgaaaaaatgatggaccaaaaaaacataaaagagctgtttctttctgctgattcatacaagacacccagctttgagacagtatcttctaattatgaaaaatcggcttttatggctgatgtagaaaaaatcaaaagctatataaaagcaggcgatatcttccagggtgttttatcacaaaaatttgaggtgccgataaaagcagatgcttttgagttataccgagtgcttaggatcgtcaatccttcgccgtatatgtattatatgaaactgctagacagagaaatagtcggcagctctccggaacggttaatacacgttcaagacgggcacttagaaatccatccgattgccggtacgagaaaacgcggtgcagacaaagctgaagatgagagactgaaggttgagctcatgaaggatgaaaaagaaaaagcggagcattacatgctcgttgatcttgcccgaaacgatatcggcagagtagcagagtatggttctgtttctgtgccggagttcacaaaaattgtttccttttcacatgtcatgcacattatctcggtggttacaggccgattgaaaaaaggggttcatcctgtcgatgcactgatgtctgctttcccggcggggactttaacaggcgcacccaaaatccgtgccatgcagcttttgcaagagctcgagccaacaccgagagagacatacggaggatgtattgcctacattgggtttgacgggaatatcgactcttgtattacgattcgcacgatgagtgtaaagaacggcgttgcatcgatacaggcaggtgctggcattgttgctgattctgttccggaagccgaatacgaagaaagctgtaataaagccggtgcgttgctgaaaacgattcatattgcagaagacatgtttcatagcaaggaggataaagctgatgaacagatttctacaattgtgcgttgatggaaaaacccttactgccggtgaggctgaaacgctgatgaatatgatgatggcagcggaaatgactccttctgaaatgggtggtatattgtctattcttgctcatcggggggagacgccagaagagcttgcgggttttgtgaaggcaatgcgggcacacgctcttacagtcgatggacttcctgatattgttgatacatgcggaacagggggagacggtatttccacttttaatatctcaacggcctcggcaattgttgcctcggcagctggcgcgaaaatcgctaagcatggcaatcgctctgtctcttctaaaagcggaagcgctgatgttttagaggagctagaggtttctattcaaaccactcccgaaaaggtcaaaagcagcattgaaacaaacaacatgggatttctttttgcgccgctttactattcgtctatgaaacatgtagcaggtactagaaaagagctaggtttcagaacggtatttaatctgcttgggccgctcagcaatcctttacgggcgaagcgtcaggtgattggggtctattctgttgaaaaagctggactgatggcaagcgcactggagacgtttcagccgaagcacgttatgtttgtatcaagccgtgacggtttagatgagctttcaattacagcaccgaccgacgtgattgaattaaaggacggagagcgccgggaatataccgtttcacccgaagatttcggtttcacaaatggcagacttgaagatttacaagtgcagtcaccgaaagagagcgcctatctcattcagaatatttttgaaaataaaagcagcagttccgctttatctattacggcttttaatgcgggagctgcgatttacacggcgggaattaccgcctcactgaaggaaggaacggagctggcgttagagacgattacaagcggaggcgctgccacgcagcttgaacgactaaagcagaaagaggaagagatctatgcttgaaaaaatcatcaaacaaaagaaagaagaagtgaaaacactggttttgccggtagagcagcctttcgagaaacgttcatttaaggaggcgctggcaagcccgaatcggtttatcgggttgattgccgaagtgaagaaagcatcgccgtcaaaagggcttattaaagaggattttgtgcctgtgcagattgcaatagactatgaggctgcgaaggcagatgcgatttccgttttaacagacaccccgttttttcaaggggaaaacagttatttatcagacgtaaagcgtgctgtttcgattcctgtacttagaaaagattttattattgattctcttcaagtagaggaatcaagaagaatcggagcggatgccatattgttaatcggcgaggtgcttgatcccttacaccttcatgaattatatcttgaagcaggtgaaaaggggatggacgtgctagtggaggttcatgatgcatcaacgctagaacaaatattgaaagtgttcacacccgacattctcggtgtaaataatcgaaacctaaaaacgtttaaaacatctgtaaagcagacagaacaaatcgcatctctcgttccgaaagaatccttgcttgtcagcgaaagcggaatcggttctttagaacatttaacatttgtcaatgaacatggggcgcgagctgtacttatcggtgaatcattgatgagacaaacttctcagcgtaaagcaatccatgctttgtttggggagtgaggttgtgaagaaaccggcattaaaatattgcggtattcggtcactaaaggatttgcagcttgcggcggaatcacaggctgattacctaggatttatttttgctgaaagcaaacgaaaagtatctccggaagatgtgaaaaaatggctgaaccaagctcgtgtcaaaaaacaggttgcaggtgtttttgttaatgaatcaatagagacgatgtcacgtattgccaagagcttgaagctcgacgtcattcagcttcacggtgatgaaaaaccgacggatgctgatgctcttcgcaagctgactggctgtgaaatatggaaggcgcttcaccatcaggataacacaactcaagaaatagcccgctttaaagataatgttgacggctttgtgattgattcatctgtaaaagggtctagaggcggaactggtgttgcattttcttgggaatgtgtgccggaatatcagcaggcggctattggtaaacgctgctttatcgctggcggcgtgaatccggatagcatcacaggcctattgaaatggcagccagaaggaattgaccttgccagcggaattgaaaaaaacggacaaaaagatcagaatctgatgaggcttttagaagaaaggatgaatcgatatgtatccatatccgaatgaaataggcagatacggtgattttggaggaaagtttgttccggaaacactcatgcagccgttagatgaaatagaaacagcatttaaacaaatcaaggatgatcccgcttttcgtgaagagtattataagctgttaaaggactattccggacggccgactgcattaacatacgctgatcgagtcactgaatacttaggcggcgcgaaaatctatttgaaacgagaagatttaaaccatacaggttctcataaaatcaataatgcgctaggtcaagcgctgcttgctaaaaaaatgggcaaaacgaaaatcattgctgaaaccggtgccggccagcatggcgttgccgctgcaacagttgcagctaaattcggcttttcctgtactgtgtttatgggtgaagaggatgttgcccgccagtctctgaacgttttccgcatgaagcttcttggagcggaggtagtgcctgtaacaagcggaaacggaacattgaaggatgccacaaatgaggcgatccggtactgggttcagcattgtgaggatcacttttatatgattggatcagttgtcggcccgcatccttatccgcaagtggtccgtgaatttcaaaaaatgatcggagaggaagcgaaggatcagttgaaacgtattgaaggcactctgcctgataaagtagtggcatgtgtaggcggaggaagcaatgcgatggggatgtttcaggcatttttaaatgaagatgttgaactgatcggcgctgaagcagcaggaaaaggaattgatacgcctcttcatgccgccactatttcgaaaggaaccgtaggggttattcacggttcattgacttatctcattcaggatgagttcgggcaaattattgagccctactctatttcagccggtctcgactatcctggaatcggtccggagcatgcatacttgcataagagcggccgtgtcacttatgacagtataaccgatgaagaagcggtggatgcattaaagcttttgtcagaaaaagaggggattttgccggcaatcgaatctgcccatgcgttagcgaaagcattcaaactcgccaaaggaatggatcgcggtcaactcattctcgtctgtttatcaggccggggagacaaggatgtcaacacattaatgaatgtattggaagaagaggtgaaagcccatgtttaaattggatcttcaaccatcagaaaaattgtttatcccgtttattacggcgggcgatccagttcctgaggtttcgattgaactggcgaagtcactccaaaaagcaggcgccacagcattggagcttggtgttgcatactctgacccgcttgcagacggtccggtgatccagcgggcttcaaagcgggcgcttgatcaaggaatgaatatcgtaaaggcaatcgaattaggcggagaaatgaaaaaaaacggagtgaatattccgattatcctctttacgtattataatcctgtgttacaattgaacaaagaatactttttcgctttactgcgggaaaatcatattgacggtctgcttgttccggatctgccattagaagaaagcaacagccttcaagaggaatgtaaaagccatgaggtgacgtatatttctttggttgcgccgacaagcgaaagccgtttgaaaaccattattgaacaagccgaggggttcgtctactgtgtatcttctctgggtgtgaccggtgtccgcaatgagttcaattcatccgtgtacccgttcattcgtactgtgaagaatctcagcactgttccggttgctgtagggttcggtatatcaaaccgtgaacaggtcataaagatgaatgaaattagtgacggtgtcgtagtgggaagtgcgctcgtcagaaaaatagaagaattaaaggaccggctcatcagcgctgaaacgagaaatcaggcgctgcaggagtttgaggattatgcaatggcgtttagcggcttgtacagtttaaaatgaggtgactgatttgcgtatcaaagaacatttaaaacagctgaagccttatcagcctggaaagccgattgaagcagtgaaatcagaatatggcttggataaagttgtgaagcttgcttcaaacgagaatccttacggctgttcagaggctgcaaaagaggcgcttcatcatgagattcaacagctagccctttacccggacgggtatagcgccgctttgcggacaaggctcagtaagcacctcaatgtcagcgaaacatcacttattttcggcaacggttctgatgaaatcatacagatcatctgccgggcatttttaaacgataaaacaaacacggttactgctgcccccacttttccgcaatataaacataatgcggttattgaaggtgctgaagtacgtgaaattgcacttcgtcccgacggctcacatgatttagacgccatgttagaagccatcgacgaacagacacaagtcgtttggatatgcagcccgaataatccgactggcacttatacatctgaaggagaattactcgcatttctggagcgcgttccttctcgtgtccttgtcgttcttgacgaagcatattatgaatatgtaacagcagaggattacccggaaaccgtgccgctcttaagcaagtattccaatttgatgattttgcgcacattttcaaaggcatacggtctggcagcgctcagagtcggatacggaattgctgacgagaacctgattcgccagattgagccggcgagagagccgtttaataccagccgtctgggccaggctgcggcgattgcagcacttgatgatcaagcgtttattgcttcctgtgtcgagcaaaataatgcaggccttcagcagtattatgattttgcgaaaactcatggtttaaagtgctacccttcacagacaaattttgtgttaattgactttaaacgtcctgctgatgaactgtttcaggctctgctggaaaaaggctatatcgtccggtcaggaaacgcattaggtttcccgacatcactccggattacgatcggaacaaaagagcaaaatgaagaaatacttgccattttagctgaaattttataagaggtgatcaaatatcacctctttagtctataaaccaggtgatgacgtatgaatcaaatgaaagatacaatattgctcgccggtctcggattgataggcggttcgattgccctagccatcaaaaaaaatcatcccggcaaacggattatcggaatcgacatctctgatgaacaggcggtagcggcattaaaattaggcgtgatagacgatcgtgctgattcgtttattagcggtgtgaaagaggcagctacagtaatcattgcgacacctgttgaacaaacactggttatgcttgaagagctggctcattcaggaattgaacatgagcttttgattacggatgtaggaagcacaaagcaaaaagtggttgattacgctgatcaagtgctgcctagccgctatcaatttgtcggagggcatccgatggcgggttcacataaatcaggagtggccgctgcgaaggagttcctgtttgaaaatgcattttatattttaacgccaggccagaaaacggacaaacaagctgtggaacagttaaaaaacctgctgaaggggacgaatgcccattttgtggaaatgtcgccagaggagcatgatggcgttacaagcgtaatcagtcattttccgcatattgtagcagctagccttgttcaccaaacccatcattcggaaaacctgtatccgcttgttaagcgttttgctgccggcgggttcagagatattacaaggattgcatcaagcagcccggcaatgtggcgggatattttattacataataaagataaaatcttagaccgttttgatgagtggattcgtgaaattgacaagatccgtacatatgtagaacaagaagatgcggaaaatctatttcgttattttaaaacagccaaggattatcgcgacgggctgccgcttcggcagaagggagcgatacctgcattttatgatttatatgtggatgtacccgatcatccgggtgtaatatccgagataacagcgatcttagctgcggagcgcatcagtatcacgaatatccgcattatcgaaacacgagaggatattaacgggattttaaggatcagttttcagtctgatgacgaccgcaaaagggcagaacaatgcattgaagcccgggcggaatatgaaactttttatgctgattgaggtggaaaaaatgaaacgagataaggtgcagaccttacatggagaaatacatattcccggtgataaatccatttctcaccgctctgttatgtttggcgcgctagcggcaggcacaacaacagttaaaaactttctgccgggagcagattgtctgagcacgatcgattgctttagaaaaatgggtgttcacattgagcaaagcagcagcgatgtcgtgattcacggaaaaggaatcgatgccctgaaagagccagaaagccttttagatgtcggaaattcaggtacaacgattcgcctgatgctcggaatattggcgggccgtcctttttacagcgcggtagccggagatgagagcattgcgaaacgcccaatgaagcgtgtgactgagcctttgaaaaaaatgggggctaaaatcgacggcagagccggcggagagtttacaccgctgtcagtgagcggcgcttcattaaaaggaattgattatgtatcacctgttgcaagcgcgcaaattaaatctgctgttttgctggccggattacaggctgagggcacaacaactgtaacagagccccataaatctcgggaccacactgagcggatgctttctgcttttggcgttaagctttctgaagatcaaacgagtgtttccattgctggtggccagaaactgacagctgctgatatttttgttcctggagacatttcttcagccgcgtttttccttgctgctggcgcgatggttccaaacagcagaattgtattgaaaaacgtaggtttaaatccgactcggacaggtattattgacgtccttcaaaacatgggggcaaaacttgaaatcaaaccatctgctgatagcggtgcagagccttatggagatttgattatagaaacgtcatctctaaaagcagttgaaatcggaggagatatcattccgcgtttaattgatgagatccctatcatcgcgcttcttgcgactcaggcggaaggaaccaccgttattaaggacgcggcagagctaaaagtgaaagaaacaaaccgtattgatactgttgtttctgagcttcgcaagctgggtgctgaaattgaaccgacagcagatggaatgaaggtttatggcaaacaaacgttgaaaggcggcgctgcagtgtccagccacggagatcatcgaatcggaatgatgcttggtattgcttcctgtataacggaggagccgattgaaatcgagcacacggatgccattcacgtttcttatccaaccttcttcgagcatttaaataagctttcgaaaaaatcctgaagttttacttcaggattttttatgcagatcataattcgaggcgaaaaaacatagcttgtcttatagaggggatagaaaaacgaaaaggggggatgtgctttacttacaagccggcaggtcaaagagctgctttactgtacagagggcgatcttccttttttcattttctatctcaagatcttttggtaaactaataagactcaataattcccttccgtacagaagcatcttatttgccgggggcattcgtctgaattatgataagattaacccgaacaaataaagcttttttgtatggttgatgttgtataggaaaagaaaggaccggtccgatttgaatacattgattcaagaagccataaaattagttgaagcaggtgaaacagaaaaaggcctcaacacgctctcgaaggctgaaaaacagctgcatgatgaagataaagccattgcagcccagctttattacgagtggggcgatgtagaaaaagccatttcactgattagtgatctacatgatttatatccaaatgaaacagaactgacgaatttctacgctgaacttttaatagatattgacgaagaagaaaaagccctcgctgtgctggagactattccggaaacagatccatcatatccggaaagtttgctgcttatggcggatctttatcagatgcaggggttattcgaagtcagtgaacaaaagcttttccaggcaaagtccattctggacaatgaacctgttattgattttgcactgggagaactttactttgctcagggagcctatgcaaaagcggttcaatattttaaaacaacggctgaggagcagagtgagatcgggggcgttaatgtccatcaaagactggcagaatcgttaagtgcctcaggtgaatttgaggatgccattccatggtatgagaaagctgtcgatgagaatcctgatcctaatacgattttcggctatggttttacagccttacaggcggggcttgtgaaaacagctattaagcagctgtctgatttaaaggagcttgatccatcttatacttcactttatatgccgctctcgaaaagctatgaagctgaaggaatgtatgaagaggcattaaaaacggcaaaagaggggatcagatatgatgaatataacaaagaacttttcctttatgccgccaaaatggccttgaaaatcgggaagtcagaagaggggaagaagctgcttcaggaggcgcttgcgcttgatccgggctttgtcgaggcccttcatacacttcttgccgtgtatcacaaagaagaggattatgatcagatcattgatcttattcaagaggttcgaagctacggtgaagaagatcctaaatacaattggtatcttgcaagcgcatatactgaattagagcaatacgaggaagcaaaacaatcctttgaggctgcctatcttcattaccgggaggatagagatttcttatatgaatacgcaagcttcctattagaagaaggccttcaaaaagaagcgctgccgcttttgaaaaaggttcttgaaatggacggagccaatgaagagcttgaagaaacgattttgcgaatcgaggatgaattttctagataagcaggaatattaaccattcatgtggaacatataagtatatagattatacgaacgatagaggagggaattacatgcagacccctgtttctgtcaatgagaaaaaagattttatccgttggtttttaaaccattatcagttaaagcgccgagagtgcgtttggatcttgaactacttaatgagccatgattctctcatggagaaggttcattttgtggagcaggctgaattttgcccgagaggcattataatgtcaacacattgtgttgaagaagttccgttccggttctataaagagaatgtcatgactaccgacgcggaaaaatcttttcatgatattagattaaataaacagcaagatttgtttatccagcttaatttccgttcggcttacagctcacctgaatatgcggcggtgctggagtccaacccgcatattccgaaaaacctttttgagaataaaaaagatcagggattggcggaacagattttagagcacgctatttccacattccaaagagaaaaattattaaaagacattgacgaggcgttagatcgtcatgataaagaggcatttgaacaattatcgcgccaattaaatcagctcacataatatgaccagccttgcagtgaattgcaaggcttgttgccgtaaagggggagaacgatgaggtggagaatcactgatgccaaggactatttacaagctaaggattacattgataccgctgtcataccattaattaacataagagttaataaccattttaaaatggcggcggagaaaggcgagtttacgcagcttctctcagaagaacttgaaaggcagttaaagggacgggtatatttacttcctccttatacatatgttgatagaaatgaaataaccgttcaagggcttaaggatttgcgggaagagctgataacggaatttccgcatgttgtcctgctcacatctgacgaaagttggagagctgaggatgcgttaggcaaaatgattgttacaccgtctgttccattagagcatttaaatgactctttaaaaagaaaaatattggatgaacgcactgctgaaattttgaacgttttgttacagttatggagcacttcataaaaacacttacatttccttataaacaatattttggctatattgaccttgctgagagattcatatattatgagggtgtctagagttattgcaatattttctattttagtcagtttgcaggggtgacctagaggggggagaagagatgggcggaaaacatgatatatccagacgtcaatttttgaattacacgctcacaggtgtaggaggttttatggcggctagtatgctcatgcctatggttcgcttcgcactcgacccggtattaaaatcgacagggaagcaggatatggttcaggttgtcagcgttgatgagttgacaaaagagccgcagcgctttgattttaaaattaatcaagtcgatgcctggtatgagtcagaagagtctagatcagcctgggtcttcaaaaacggggatgaaattgtagcactttcgccaatttgtaagcatttagggtgtacggtgaactggaatagtgatcctaaaaacccgaataaattcttttgtccatgccattacggactctatgaaaaggacggcaccaatgtccctggcacgccgccgcttgcgcctcttgatcattatgagcaagaagtaaaagacggcttcctgtatcttggaaaagcaaagcctaagggggaagggtgacatgctgaacaaaatttatgactgggtagacgagcggcttgatattacaccgatgtggagggatattgccgatcacgaagtaccggaacatgtgaatcccgcccatcatttctctgcgtttgtgtattgctttgggggactgacgttttttgtaaccgttatccaagtattatctggaatgtttttaacgatgtattatgtgcctgatatcaaaaatgcctgggaatcggtatattatttgcaaaatgaagtggcattcggccagattgtcagggggatgcaccactggggtgcgagcctggtcattgtgatgatgtttttacatacgctgagggtctttttccaaggcgcgtataaaaaaccgcgcgagctgaactggattgtcggtgtgctgatcttttttgttatgctcggtcttggctttacaggctacttgcttccttgggatatgaaggctctgtttgcaacaaaagtcgggctgcagatcgccgaagccacgcctttgatcggaacgcaagttaaaacgctccttgcagggcatccggatattgtaggcgcccaaacgctgactaggttttttgcgatccatgtattttttcttcctgccgcattgttcgggctgatggctgcacattttattatgatccggaagcaggggatttcaggaccgctttaaactcttgatctgcgaataaaagggaggggatgacatgcaccggggcaaagggatgaaatttgtaggcgactcaaggataccggctgaaaaaaagccgaatataccgaaggattattcggagtatccgggtaaaacagaggctttctggccaaatttcttgttaaaggaatggatggttggagctgtctttctcatcggttttctcgttttgacgattgtgcatcagccgcctttggagcggatggcggacccgactgatactggttatattccgctgccggattggtattttcttttcttataccagctgttgaagtatgaatacgccgccggaagctttacagtggtcggcgccatgattatgccaggtctcgcttttggggccctgcttttggctccattcctagacagagggacagaaagaaggccgtggaagcgtccggtcgctgtcggtatgatgcttctggccatttccgctgctgtatttttgacgtggcagtcagttgctactcatgactgggccaaggcagaagaacaggggaaaatcacaaaagaagccgacattgacaccaatgcagaaggatataaggtctttaaggaacagggctgtatttcttgccatggggataaccttcagggaggagcggctgggccttcattggttgacagcgggctgaaaccggaagaaatcaaaaaaatcgctgtagaagggaaaggcaaaatgccggcgggtgtgttcaaaggaaatgataagcagctcgaagaacttgcaaaatttatttctgaaacaaccgcaaaataacgtattgtgaattgtcaaatggaaggatatacttttaatatcaaaagctgacccggcgtcagcttttttatatggacatattatttttacagactgagagttgattcgatgtgaaatggtttcaatatgtattagggcagcggccgatgcttattcttgtcttagccattaattttctgggaacggtttacggctactattggtacttgccgcagcttttggagacaccggcccgtttcctgatttttgttccggacagtccgacagcaacgtttttctttctgtttgtgctgcttgcctttctcatgaaacggaatgctccgcttttagaggcgcttgcgctagttaccctcgtaaagtatggcctatgggcggtggctatgaattttcttgtgcttgcagtaactggtgacttgccgtgggagggctacatgctaattgcttcgcattttgcaatggcagttcaaggcgtattatacagtccgtattttcgtttttcattttggcatcttgcaattgctgcagtctggacactgcataacgatgtcattgactacttgtttgatatgatgccgcaatactctatgctttctgattatatgactgaaataggatacggaacattttggctaagcatcttttcaatcacgcttgcttactttcttgtggtctcaaaaaaacaaacgaagcttgagctgatgtaaagacaatgttggtctatccttgtccctttcttcatattctgtaaggagagagagtgggagggacctgcatgaaacgaaagctgacgatctgtttgttgattgcacttattttttataatggaaatgccaaggctgcagagcggggaagcctcgaggaattgaatgatttatccgatacagtctttcaaatgacccgacaggcgaaatatgaagaggcgcttcaagtcttggagtattttgaaaaaacattaaaatccgctgagaaaaaacagcaagaccccatgctaacgggagcccaaattcgtcaaatcacattgggctataatgatatggttcggagtttaaagcaagctgatacatcagacacacaaaaactcagagcagccgcgcagttcagaatgctgatggatgcggttgacaatcggtctgacccgctttggggctcactggaaaaaccgattatggaagcttttactgagctgaagcgagatgtccagaagaatggaagcacaagctttcatgaaaaatggaatgaatttatcagtttatatgacttgatttaccccagtcttacaatcgatgtatcagaggatcagcttgaaacagtcggaaaacatatagatgttattgagcaagaggaatttcagcaaatgacagagagcacgaagcttgaacggctttcccttcttcagcatgacctgaaaaatgtgtttgacagggtggaggaggatgatgccgatccgtctttactctgggtgatgattacaaccggcagtatcatcattactgctcttacctatgtcggttacagaaagtacaaggcggaaaaaaacaagctgaaaaaaagggactaccctaaataagggtgaggggcggcggtcagccgccttttttctattacatgtcagcgcggaagcggatttttattttcatcaagcgtaaatccttctccgagcacatcgtgaacatcgcttaccgctacaaaggcatggggatcaatggagttaatcacgcttttcagcatcaccaattcgtttttcggcaccacacaataaagtacatctatatcctcttttgtgtaggagccttgtcctttcaaaatggtgacgccccgttccatttcttcaagaatctttttctgaatcaggtcgtttttcgaagagatgatcttagcgcctttagcagcgtatccgccttcctgaataaaatcgattaatcttgcagctacaaatacagctaccagcgtatacatcgcttctttataggagagataagtaagcaaagacaaaatgatgacgcaggcatcgaaagcaaacatcgttctgcccatcgggatcccaaaatacttattcactaaacgtgcgatgatatcaacaccgcctgtcgtaccgccgaacttaaaaataattcccaatccggctccgatgaatacgccggcaaataaagcggcgagcgctaagtcgtgctgaaggggcatatggatttcatatcgctgaaagatgctgaggaacaaagacaaggctacagtgcctacaagggtataaacaaacattgtcctgccgagcaaacgccagccaataaaaaaaatcggaatgttcaacaccaggttcgagatagaggggctgatgtggaaaagggcataaagcaaaagtgtaatacctgtaaaaccgccctcagccagattgttctgcatattgaaatgaaccaagccaaatgaaaaaattgccgctccgattaaaataaaaaatatgttttttaatctaatttctccaagcatcacacaaaaccccttttccttccattagatagcgtttatattatagtggatgaaaaagaaaacagcaaacgtgcttaaacatttgtcaaacgtatctgaattagctaacatgtaagaggatgataggaggtttcgttcagtgagtgataaaacaatgaaagacatacaggctgaagtagaccgttacataggccaatttaaagaaggatattttagcccgctggccatgatggcgaggctgactgaagaactgggcgagcttgccagagaagtgaatcaccgttatggagaaaaaccaaaaaaagcgactgaagatgataaaagcatggaagaggaaataggcgatgtgctatttgtattggtttgtttagccaactctcttgatatctctttagaggaagctcacgaccgagtcatgcataaatttaatacaagagataaagatcgctggaccagaaaagaagaaggaaagtagaggagatcaagatgtcaaacgaaacaattaaagtagtcattgcgggaccgcgtggaagaatggggcaggaagctgttaaattggcagaacgaacacctcattttgaccttgtcggggccatagaccatacatacgatcagcaaaaattatctgatgtgatgcctgttgagtcagatgctttcatttatacagatatccatgcctgttttacagaaacacaaccggatgtcttgattgatttaacaacgcccgaaatcggaaaagtacatacaaaaattgcattagagcacggagtccgtccagttgtcggaacaaccggtttctcagaagctgatttaaaagagctcacgtctttaacagaagaaaaagggatcggagccatcatcgcgccaaattttgcgctcggtgcgatactgatgatgaaattttcaaaaatggctgccaactattttgaggatgttgagattattgagcttcatcatgaccagaagcttgacgcaccaagcggaactgcgcttaaaacagcggaaatgatttcagaagtccgtaaagaaaagcagcaaggacatccggatgaaaaagaaattctcccaggagcaagaggagcggagcaaaacggtattcgcttgcacagcgtccgtcttccgggactgatcgcgcatcaggaggtcatgttcggcatggatggccaaacgcttcagatacgccatgattcttataaccgtgcttctttcatgtcaggcgttaaactgtcagtcgaacaagtcatgaagattgatcagcttgtgtacggtttagaaaatatcattgattagacggggggataaacaatgaaaattgctttgatcgcgcatgacaagaaaaaacaggacatggttcaatttacgactgcctatcgggatattttaaagaatcatgatttatacgcaaccggaaccacagggttgaaaattcaagaggcgacaggtcttcaaattgaacgttttcaatccggccctttagggggagaccagcaaatcggtgcattgatcgctgccaatgcactcgatctggtcatttttttgcgcgacccgctgaccgcgcagccgcatgaaccggatgtctcggcattaatccggttatgtgatgtgtattccattccgctcgccacaaatatgggtactgcggaaattcttgtccgcacacttgatgaaggtgttttcgaattccgtgaccttcttcggggagaagagccgaatgtataatgctgacgttcttgcttttggcgcccacagtgatgatgtcgagatcggaatgggcggcacaatagcgaagtttgtcaaacagggaaaaaaagtaatgatatgcgacttgacagaagcggaactctcttctaacggtacggtcagtttacgtaaagaagaagcagctgaagcagcccgcatattaggcgcagataaaagaattcagctgacgcttccagaccgcggcctaataatgagtgatcaggcaattcggtcgattgtcactgtcatcagaacctgccgcccaaaagcggtttttatgccgtataaaaaggatcgccatccggatcacggcaatgcggctgcactggtggaagaagcgatcttttccgccggaatccataaatataaagatgaaaaaagccttccggcgcataaagtcagcaaggtttactattatatgataaatggttttcatcagccggattttgtcattgatatctcggatacaatagaggcaaagaaacaaagcctcaacgcctacaaaagccagtttatcccgtcaaaggattcagtttctactcctctgacgaatggttatatcgagatcgttgaagcgagagaaaagctttacggtaaagaagcgggcgtggagtatgccgaaggtttcttttccaaacggatgctgatgcttgatcatgatgtgcttgggggcgaacaatgagaaaactaaaaataggaatcacatgctatccgagcgttggaggctcaggtatcattgcgacagaactggggaagcagcttgctgaaaagggacatgaaatccatttcatcacatcaagcattccgtttagactgaatacatatcatcccaatattcattttcatgaagttgaggttaatcaatatgctgtttttaagtatcctccgtatgatttgacattggcaagcaaaatcgcagaggtggcggaacgggagaatttagacattatccatgctcactatgctctcccgcatgccgtttgcgcctatcttgcaaaacaaatgctgaaacgcaatatcggcattgttaccactttgcatggcacggatatcacggtgttaggttatgatccgtctctaaaagatctgatccgttttgctattgagtcatcagacagggtgacggccgtctcctcagcgcttgcggctgaaacatacgatttaattaaaccggagaaaaaaattgaaacgatttataactttatagacgagcgcgtgtatctgaagaaaaacacagcggcaattaaagagaaacatggaattttaccagatgaaaaagtcgtcatccatgtgtccaacttcagaaaagttaaacgcgtgcaggatgtcatcagtgtgttccgcaatatcgctggcaaaacgaaagcgaagctgcttttagtcggagacggtccggagaaatcgacagcctgcgagcttatcagaaaatatggcttggaagaccaagtcttaatgcttggaaatcaagaccgtgttgaagagctttattctattagcgatttgaagctgctgctatctgaaaaagaaagctttggccttgtcctgcttgaagcgatggcttgcggagtgccttgtatcggaacaaatattggcggtatccctgaggttataaaaaacaatgtgagcggatttttggtggatgtcggtgatgttactgccgcaacagcccgcgcgatgagcattttagaagatgaacagctaagcaatcgttttacaaaggcggcaatagagatgcttgaaaatgaattttcttccaaaaaaattgtcagccagtatgaacagatttatgccgatttagcagaaccggagtgatcacatggaaaaagtttttatcaaagcacttcccgtgctccgcatcttaatcgaagcaggccatcaggcttattttgtcggaggcgcagttcgtgacagctatatgaaacgaacgatcggagatgtcgatatcgcgacagatgcggcacctgatcaagtagaacggctgtttcagcggactgttgatgtaggcaaagagcacgggaccattattgtgctctgggaggatgaaacctatgaagtcacgacattccggactgaatctgattatgttgatttcagaagaccgtcagaagtgcaatttatctcatcattagaagaggatctaaaacgcagagatttaacgatcaatgcgatggccatgacagcggatgggaaggtgcttgattattttggcggcaagaaagatattgatcagaaagtgattcgaaccgttggaaagcctgaggatagatttcaagaggatgcgcttcgtatgctgagagccgtacgctttatgagccagcttggctttacgctttcaccggaaacagaagaagccattgcgaaagaaaaatcactcctctcccatgtttcagtcgaacgaaaaactatagagttcgagaaattgctgcagggaagagcttctcgccaggcgcttcaaacactcattcaaacgagattgtatgaagagcttcctggtatttatcataaacgagaaaacctgatttcaacgagtgagtttccattcttctctttaacatcccgtgaggaactttgggctgctcttttaattaaccttgacatagtcttgaaagacgcgccccttttcctgaaagcctggaagctcccgggaaaagtgatcaaggaagccattcacattgctgatacgtttggccagagccttgacgtaatgacaatgtacagagctggggaaaaagcactgctctctgcggccaaaatatcgcagcttcggcaaaacgaaaaactggatgaaaagaaactgaaggacattcagtacgcttatcaaaacctgccgatcaaaagccttaaggatcttgatatcacgggtaaggacttgcttgcgcttcgaaaccggccggctggaaaatgggtgtcggaagaattacagcggatcgagcaggctgttgtgacagggaagctctccaatcaaaagaaacacatagaggagtggctgaagacatgcggtcaacattaagaaaagaccttattgaattattttctcaggccggcaatgaatttatttccggccaaaaaatcagtgatgctctcggctgttcaagaactgctgtgtggaagcatattgaagagcttcggaaagagggttatgaagtagaagccgttagaagaaaaggatatcggctcatcaaaaaacccggaaaactcagtgaaagcgaaattcgttttggattaaaaacggaagtgatgggccagcatcttatttaccatgacgttctttcaagcacgcaaaaaacggctcatgagctcgcgaataataacgcaccggaaggcacccttgtggtggctgacaaacaaacagccggaaggggccgaatgtctagggtatggcattctcaagaaggaaacggtgtttggatgagcctgattttgcggcctgacattccgctccaaaaaacaccgcagctgactctgcttgctgcagtagctgttgtgcagggaatagaagaggcagcaggcatccaaacggatattaaatggccaaatgatattttgattaacggaaaaaaaacagtcggcatcctaacggaaatgcaggctgaagaagaccgcgtacgttcagtgatcattgggatcggcattaacgttaaccagcagcctaatgattttccagatgaattgaaggacatcgcgacaagcctcagccaagctgctggggaaaaaattgatcgggccggcgtcatccagcatattttactatgctttgagaaacggtaccgggattatatgacgcacggatttacgccgattaagcttttatgggaaagctatgcgctcggtattggcactaatatgagagccagaacgttaaacggaaccttttacgggaaggcgttaggtatagatgatgaaggcgttctgcttttagaaacgaacgaaggcattaaaaaaatctattctgccgatatcgaattgggctaatgtgttggtacaagcccgttgattttggtatacttccattgggcagtatcgcctgcgaactgcacctattattaaaatagatagacattgcagcagtctgccttgatccaaaaaaggactgggacagagggatgaaactcgccgaactttagaaagtgaagaatccttctcgttgtaacggaaggttttttggcttgcagaagaaacggcagatcatctcctctaaacatgaggaggagaaaacatgaaaacaaaactggattttctaaaaatgaaggagtctgaagaaccgattgtcatgctgaccgcttatgattatccggcagctaaacttgctgaacaagcgggagttgacatgattttagtcggtgattcactcggaatggtcgtcctcggccttgattcaactgtgggtgtgacagttgcggatatgattcatcatacaaaagccgttaaaaggggtgcgccgaatacctttattgtgacagatatgccgtttatgtcttatcacctgtccaaggaagatacgctgaaaaatgcagcggctatcgttcaggaaagcggagctgacgcactgaagcttgagggcggagaaggcgtgtttgaatccattcgcgcattgacgcttggaggcattccagtagtcagtcacttaggtttgacaccgcagtcagtcggcgtactgggcggctataaagtacagggcaaagacgaacaaagcgccaaaaaattaatagaagacagtataaaatgcgaagaagcaggagctatgatgcttgtgctggaatgtgtaccggcagaactcacagccaaaattgccgatacgctaagcataccggtcattggaatcggggcgggtgtgaaagcagacggacaagttctcgtttatcatgatattatcggccacggtgttgagagaacacctaaatttgtaaagcaatatacgcgtattgatgaaaccatcgaaacagcaatcagcggatatgttcaggatgtaagacatcgtgctttccctgaacaaaagcattcctttcaaatgaaccagacagtgctggacggcttgtacgggggaaaataagatgagacagattactgatattacacagctgaaagaagccataaaacaatatcattcagagggcaagtcaatcggatttgttccgacgatggggtttctgcatgaggggcatttaaccttagcagacaaagcaagacaagaaaacgacgccgttattatgagtatttttgtgaatcctgcacaattcggccctaatgaagattttgaagcatatccgcgcgatattgagcgggatgcagctcttgcagaaaacgccggagtcgatattttatttacgccagatgctcatgatatgtatcccggtgaaaagaatgtcacgattcatgtagaaagacgcacagacgtgttatgcgggcgctcaagagaaggacattttgacggggtcgcgatcgtactgacgaagcttttcaacctagtcaagccgactcgtgcctatttcggtttaaaggatgcgcagcaggtagctgttgttgatgggttaatcagtgacttcttcatggatattgaattggttcctgtcgatacggtcagagaggaagacggcttagctaaaagctctcgcaatgtatacttaacagctgaggaaagaaaagaagcgcctaagctgtatcgggcccttcaaacaagtgcggagctgatccaagccggtgaaagagatcctgaagcggtgataaaagctgcaaaagaaatcattgaaacgactagcggaaccatagactatgtagagctttattcctatccggaactcgagcctgtgaatgaaattgctggaaagatgattctcgctgttgcagttgctttttcaaaagcgcgtttaatagataatatcattattgatattcgagaaatggagagaatataatatgtatcgaacaatgatgagcggcaagcttcacagggcaactgttacggaagcaaacctgaactatgtgggaagcattacaattgatgaagatctcattgatgctgtgggaatgcttcctaatgaaaaagtacaaattgtgaataataataatggagcacgtcttgaaacgtatattattcctggtaaacggggaagcggcgtcatatgcttaaacggtgcagccgcacgccttgtgcaggaaggagataaggtcattattatttcctacaaaatgatgtctgatcaagaagcggcaagccacgagccgaaagtggctgttctgaatgatcaaaacaaaattgaacaaatgctggggaacgaaccagcccgtacaattttgtagaagaaaagccccctttatcgggggttttcttttaagattttgagagtaaaacggttttgccgctccatttccgtacaaaacgtgttacacttttgtcgtatgcaagaattgaggtgtccattttaatgaataagcaacggttcgttgttatagatgtagagacaacagggaattcgccgaagaaaggcgataaaatcatacaaatcgcagcggttgtaatcgaaaatggacaaattactgagcggttttcaaaatacattaatccaaataaatcaatccctgcttttattgagcagcttactggaatctctaatcaaatggtcgagaatgaacagccatttgaagcagttgctgaagaagtattccaattgcttgacggcgcttattttgtcgcacacaatatccattttgaccttggatttgtcaagtatgagctacataaggcgggctttcagctcccagattgtgaagtgcttgatactgtcgagctctcacgtattgtttttccgggatttgaagggtataagctgacggaattaagcgaggagcttcagctgcggcatgatcagccgcaccgggctgacagcgatgctgaagtgacagggcttatttttttggaaatccttgaaaagctgcggcagcttccttatccgacattaaagcagttaagaaggctttcgcagcatttcatcagtgatctgacgcatttgttggatatgttcattaatgaaaacagacataccgagataccgggctatacgcgcttttcttcgttttctgtcagagaacctgaagctatcgatgttcgtataaatgaggacgagaacttctcatttgagatcgaaagctgggaagcgggaaatgaaaaagcgctgtcagagttaatgcctgggtatgaaaaaagagacggccaaatgatgatgatgagagaggtggctgatgcgtttgccaatcgtgagcatgcgctgattgaagctcctccaggcatcggaaaaacgattggctatcttattccggctgcgctttttgccaagaaatcaaaaaagccggtcataatcagcacgtattcgacgcttttacagcagcagattctcacaaaggatttgccgattgtccaagatctgtttccatttccggtaacagcggcgattttaaaagggcaatcgcattatttatgcctgtataaatttgagcaggtgcttcatgaagaagatgataattatgatgccgtactgacaaaggcacagcttctcgtttggctgacagagacaaatacaggagatgtagcggaactgaatttgccttcaggcggaaaattgctgtgggacagattggcttatgacgatgactcctataaaagaagtcgcagtgagcatgtgatcggtttttacgagcgggccaaacagattgctttgcgttccgatttggtgatcaccaatcattctcttttgctgaccgatgaaggcagccagaaaaaaaggcttcccgaaagcggcacatttattattgatgaagcacaccattttgaacgtgcggcaagcgaacatttagggaaaagagctacgtacatagaattgcatacgaaattgagcagaatcggcactctgaaggagcagggacttctaaaaaagatgagacagctattccagcgaaacagcctgccggttgattcatttttcgaattggaagagtggcttcagcacgttcaagcagaaagtgatgctttcttcagctctgtacattcttttgtcaaacgaagaaaacctaaagaagacttaaaccgtctagtgtttaaggtgaacaaagaaagccaggataaaagctggtcgatcttaacagatggtgcggagaggctttgttccatgctgacacatttgcagcagctttttgaggcgcagtcatcccttatggaaaaacatttgaagggtatgaagagcaaaaccgtctttttagccgatgaataccaaagaagcatgaaaggcttgcagcattactgtcagacgttgcagaagctcttctttgggtctgatgacgatgaagcggtttggattgaaatagatgcaaagggtgcgaaaaatgcagtggccatttacgcacagcctcttgaacctggtgaacttctggctgatcagtttttcgcgcgcaaaaatagtgtggtgctgacatctgcaacccttacagtcgaaggttcttttcaatttatgattgaacgactgggactgagtgactttttcccgcggacaatgagaattgagtcacctttttcttacgatgagcgtatgcaggtaatgattccaaaggaaatgaaatcaattcaggataccgggcaacctgaatttatacaggatacagcccgttatatcgaactgatggcaaaggaaaaacagcctaaaatccttgtgctgtttacatcccatgatatgctgaaaaaggttcaccaggagctcaagcataacatgagtgcttccggcattcagctcttggcacaagggattacaggcgggagtcccggcaaactgatgaagacttttaaaacatccaatcaggcgatcctgctcggaacaaatcatttttgggaaggcgttgatttccctggtgatgagctgacaacagtaatgatcgtgaggctcccattccggtcccctgatcacccgcttcatgctgcaaaatgtgagctagcccgcaaaaaaggaaagaatccgtttcaaacagtgtcattaccggaagctgtgctgaccttcaggcaaggaatcggacgcttgctgcgttctgcgggagacaagggaacgattatgatattggacagacggattaaaaccgctggttacggccggctgtttcttgatgccttgccgacaacctcagtatccgaaatgactgacagcgagcttgaagcttatgttgcaggggaaaaagaataaaagccgcataaagcggcttttgcggtgtgggagtaggatggtgttttatttaaaagcggatttcccgctctgtgatactagtatggcgtgtcctgaaatggagtatgactaacaatatttgttcaaactggaggatgaaaaaatggaaagtaaaatcgaaattctttcaacaattaatgtagagcattctgatgatctgtataaaattgtggacacattgaatcgtacactgaaaagagacaatctgatgttcggccttgcgctggatgaagaaaacaaaaaccaagccgtttttaccatttatcgtacgtaggtgagaagatgagaaaaaaagcattaatatttaccgtcatttttggtattatttttttagcagtacttcttgtctcggcaagcatttataaatcagccatggcacaaaaggaagaggggcacgaagcagcagctgctgaagctaaaaaagaaaccgatctcgccaatgttgatcaagtcgaaacatttgtcggaaaagaaaaatattatgttgtaaagggaacggataaaaaaggcactgcgttatatgtctgggttcctgctgataaaaaagcaaaaattctctcaaaagaagcgaaagagggaatctctgaagacaaagcggcgaaaatcataaaggatgaagggctggtttcaaagcaaaaagaggttcatctggcaagagaaggaaacgtcctgctttgggaagtgacgtacttagacaaagaagggcaatacagtttaagttatgtggactttacaactggaaagattctcaaaaatatcacgccttaagacgaattagggggagttcaagttgaaactggcaaaaagagtatccgcattaacaccatcaaccacactggcaatcacagcgaaagcgaaagaactgaaagccgcaggccatgatgtcatcggcttaggagcaggcgagcctgacttcaatacaccgcagcatattattgatgccgctgtgcgttcgatgaacgagggccatacgaaatacacgccttccggtggtttggctgaactgaaaaacagcattgcagagaaatttaaacgcgaccagaatattgaatacaaaccgtctcaaattattgtctgcactggtgccaaacatgctctgtatacccttttccaagtgattttggatgaagaagatgaagttattattccaacgccttactgggtaagctacccggagcaggtgaaactcgctggcggaaagcctgtttatgtagaagggcttgaggaaaatcacttcaaaatttcgcctgagcagctgaaaaatgcaattacggaaaaaacaaaagcaatcgttattaactctccaagcaacccgactggtgtcatgtatacggaagaagaactatctgcgctcggtgaagtgtgccttgaacatgatatcttgattgtgtcagatgaaatttatgaaaaacttacatacggcggaaagaaacatgtttccattgcacagctgtcagacagactgaaagagcaaacggtcattataaacggcgtatcgaagtcccacagcatgacaggctggagaatcggttatgcggcaggctctgaagacattattaaagcgatgacgaaccttgcaagccacagcacgtcaaacccgacatcaatcgcacaatacggagcgattgctgcttataacgggccttctgagccattggaagaaatgagagaagcatttgaacatagattaaatacgatctatgcaaagcttatagaaatcccagggttcagctgtgtgaagccggaaggtgctttttacttgttcccaaatgcaaaagaggcagctcaatcttgcggtttcaaagatgtagatgaatttgttaaagcgcttctcgaggaggaaaaagttgcgattgttccaggatccggatttggctctcctgagaatgtccgtctttcttatgcaacatcgttagatcttcttgaaaaagccattgaaagaatcaagcgttttgtagaaaaacatagctaacagatcaaaaagcggctgacacaaaagccgctttttatctgcattgacccggttagttaagagcgggtataataaagtgatgataaaagagttcgcggggcaatgagcttccgaatgtctttcttgttttggagggaaatatgttgaaaacaacaatcaaccaagtgtacaagcacgtaggtgaggaagtaacgatcggagcttgggtcgctaataagcgttcaagcgggaaaattgcgtttttacagcttcgggacggtaccggttttattcagggtgtcgtagtaaaagcggaagtggaagaaagcattttccaaacagctaaatcagtgacgcaggaaacgtcgctctatataaaagggattgtcaaagaggacgagcgttctccgcttggatatgaacttgctgtgacagatattgaagtcattcacgaagcgaccgattatccaattacaccaaaagaacacggaacggaatttttgatggatcacagacatttatggctgcgttcaaagcgccagcatgcgatcatgaaaatccgtaatgaaatcattcgcgcgacttacgaattctttaataacgaaggcttcgtaaaagtggatccgccgattttgactggaagcgcacctgaaggtacaacagaactctttgcgacaaagtactttgatgaagatgcgtatctgtctcaaagcggccagctctacatggaagctgcggcaatggctttaggaaaagtattctctttcggaccgacattcagagcggaaaagtctaaaacaaagcgtcacttaatcgaattctggatgatcgaaccggaaatggcgtttgtagaatttgaagaaaaccttcaagtacaggaaaattacgtttctttcatcgtacaatcagttcttaagaattgtaaaattgaattaaacacattgggaagagacacgtcaaaacttgagcaaatcaaagccccgttcccaagaatcacgtatgatgaagcgattgaatttctgaaagaaaaaggctttgacgatatcgagtggggagatgatttcggagcgcctcatgaaacagcgattgctgaacattatgacaaaccggtattcatcactcgctatccgacgtccttaaaaccgttctatatgcagccggcttctgaccgtgaggacgttgtgctttgcgctgacttgattgcgccggaaggctatggagaaatcatcggcgggtctgaacggattcacgatatggaacttttggaatcgcgtcttaaagaacatggactggattctgacgcatataaatggtatgctgaacttagaaaatatggatcagttcctcattccggcttcggccttggattagagcggacagtagcttggatcagcggagcgcctcacgttcgtgaaacgattccgttcccaagactgttaaaccgtctgtatccgtaatacattcaaatgaaacaaaaaagagtctcctgcaagggagactttttacagtaaaggggcaatcacaatcctttacagtaagaggtgtgacgatgaaaaaacagcaatttattgatatgcaggagcagggaacatcaaccatccccaatcttctgctcacgcattataaacagcttgggcttaatgaaacagaacttattctgctgttaaaaattaaaatgcatttagaaaaaggatcatattttcctacaccgaatcagctgcaggaaggtatgtcaatttctgttgaagaatgcacaaacagattgcggatgtttattcaaaaaggctttctgtttattgaagaatgcgaggatcaaaacggcatcaaatttgagaaatattctcttcagcctttatgggggaaactgtacgagtatattcagcttgcacagaatcaaacacaggaaagaaaagcagaaggggaacaaaaaagcctttataccatttttgaggaagagttcgcaaggccgttatcgcctttggagtgtgaaacgctggcgatctggcaggaccaggatcagcatgacgcacaactgatcaaacacgcgttaaaagaggctgtactatcaggaaaactcagtttccgctacattgaccggattttgtttgaatggaagaaaaacgggcttaaaactgtggagcaggcaaaaatacacagccaaaaattccggcgtgtacaagcaaagcagaatgaaccgcaaaaagagtataaaaggcaggttcctttttacaattggcttgaacaataaagtgaaaaggtgacaatcgtgttaaatctaaaacaaattgaattctgtttagacaagataggtgacatgtttcctcatgcggagtgtgaactggttcattccaatccttttgaattagtggtggctgttgctttatctgcgcaatgtacagatgcacttgtaaacagagtgaccaaaacattattccaaaaatataaacggccggaagactatttggctgttccgctggaagagcttcagcaggatattaaatcaatcggtttatatcgtaataaagcgaaaaatattcaaaagctgagtaaaatgattattgaagattacggcggagaagtgccgagagaccgcgatgagcttgtcaaactgccaggggtcgggagaaagaccgcaaacgtagtggtatccgttgcgtttggcgtgccggccatagccgtagatacccatgtggagagagtcagcaaacgattgggcatttgccggtggaaggactcggttctggaagttgaaaagacgctgatgcgcaaggttcccaaagaagactggtccgttacgcatcaccggcttattttcttcggcagatatcactgtaaagcccaatctccgcgctgtgcggagtgtccgctgctttctttgtgcagagaagggcagaagagggataaaaaaggactggtgaaacgatgacgcaagcaaaagaagtgttggcttcctatgagcaatacttgcgcagtcttggccagaagagttcctcggatatgaagaaaaccttgcagaccaatcccgtgtattttgatttctgcacggaattacaaggcgatttgccatgggaggacagcgggaaatacgttccgcttttatttgaagtgtgggatgacatcaaagcatcacttctcccagtctttcaaacacgaaaatcgagatgtgaccaaaacgaaatgttaaagggcattgtgtgtttgctggcttcgttacattggacagcaggtgagccggtgaaatcgctcgattggcaagaactgagggagaaatcatatcccgcaaagccgattaattgggctgaacgagtggaatttattcttcttaagccgacccaataccattgctttattcagcttgatgagctgattaccgaaatgaaaaagcatttttataaatatcatgcgatgaatcgataaaacctcctgttaaaacgggaggttttttattgtgtaccaaaaaagccatcaccccaaaggtgacggcttttttgtttaatttgttttttcaatggatgatgagtttgtttgtgttttattagatgtgtctgttttatttttattcgtgtcagaacctgttgaatcattcttaccagagttcgaatcaccatccgacgtatcctggttgttactgttgtcgttatcgttatcgtttgattggtcttggttattgttgtcggacggattggtgttcgtattgtcttgttttttgtcttgatcgtttgttgaatcatctgtctgatcttgatccgtctgaccgtcatctttttgagaatcatcagtttgtgtatcatcctgattcttctcatcatcttgtttttcatcatccgtttgttgctggtcttttttatcttcatcgtcttcagcttttggcacctcataagatgtggaagctgtacttttgccatcatcactgacggctgttacttcgaatttgtatacagatcctggctgcacacccgaaataactgcctcttttgcagagctgttttgaatttccgagtagctgccgccgtcaacagattgcttaacagcaaaggtcgcatctccgtcgtaattccagcttaacgttaaagattgattgtctttatcgtatttcacgtttaaaccagacagtttagctgtttcctctttttcttctttctcatatgttttagaaacagtagaaggagctgtgcctttaacaaagtactctgtgagcttcttatcgcttggcgtatttggccctgccagttttgccggattagaacctttttctacggtggcttccactacgctgtcaggcttctcaaatgatccgcttccgtcatcgacatcggcgatgagctgggcgaagatgcgctttgcaactttttgctcttcagctgaaagtgatttctttccagcctcgttttctcccattcccgtccagacggcagctgtatattgcggtgtgtagccaacgaaccaagaatctcgggcgccaccgctagcgatattgtaccttttgacttcattatcatcaaagttagtcgttcctgtttttcctgcaacttctacaccaggtacttgtgcaagctgtccagtacctgtcttcacagctgttttcagcatatctgtaatcataaacgcagtataatcactcatggctgattttgattttggtgttaagtcaagcttcgtgccatcgttaaattcgatagattttacaaaatgcggttcattatacgttccgttatttccaaacgcgctgtatgcacctgccattgtcagaggagaaacaccatcgttcccaccgaaaccgccaatagaataggcctctgttacattatcttttgttaaaccaagcccgagtccatttgcaaagtctacagcagtatctttaccgactgcctggaatgcttttaaagcaggtatatttcttgattgggccagagcgtaacgcattgagataggccctagatatttgcggtcccaatcacgaatcggttttccgttagaatacgtataagctgagtcatcaatttgttcgtatgtggaccatttcttattttcaataactggtccgtagtccaaaatcggttttatggtcgaaccaggctgtgccttagtttgagtagcatagttaaagcctccgacaggctgattgcgtcccgcaccaatcgctcggacttctccgtttttggtatcgagaagcgtcacaccgccctgcatgccttcagtaaatccgacggtgtctccgtccattaattcatctagtttatcttgtgcttttgtatctaatgtcgtatagatctttaatccgtcagcagatggatcgacatcagatttttcatcaatttccttcataacctcttcaacaaatgcgctgtatttgtttgtacttgctttttcatattccttctgtgacacgacgccttcgtctttcactgccacttttttcgctttgttatattgagaatcagaaataaatccttgctttttcatcagactgagtacgatgttccgtcgtttttccgctttatccgggtttttgaccgggttgtacgctgttgggctctgcggcattcctgcaagcgtcgcagcctgttcgacagtcaatttgcttaaatcagtaacgccgaaaaattcttccgccgcttttccgattccgtatgctctaggagaaaaataaatccggtttaaatacatttctaaaatttcatctttagagtaattgcgctccagctgaatcgaaagccatacttcctgcaccttccgtttcaacgtcttctgatgtgaaagaagggagtttttgacgacctgctgggtgatcgtacttccgccttcagccccgaagccgtctttaaagttggcaactaatgcaccgccgatacggacagggtcaatcccgtggtgctcataaaaacgagcgtcttctgtcgcgataaaggcttcttttacaacatcgggaatttcatctatcgagacgtaggtccgtttttcggcgccgacttcggcgatctcttttccatttttatcataaatcgttgatgaataaggcgtcttcaatttgctttcatcaagggacggcgcatcagaaaccatgacggcaaatgtaacagcaccgccgactacgcctaaaacaaacagaatgagtaaagtgaaaagggtctttttaaacaatccgcccttttttcgtttcttgccttttttcggtgaaggactcgatttgctgttcgcttttcgtcgagcttcacggctgttaaattgatctgacataacatctcaacctttcgttaatcaacctttcgcaccagatgatggcgaaaaataaagctgttcaataatactaatataatcaattctgggtgcgtatccaagagaaatcggataagctgtttcttccaactcatcttttcgaattgattttctgccgtttttttcttttctgtcccagaaataaaacagcttatcggcttccaaaaaataaacctggtcgaaagcggatataataacaaaacaaataccgtcttgagcctttacctgcttcatatgctcgatttgatggtcatgaaaattctgcagggggaaagaggtcttgtttttcgtttctttcgcctcaaaatcaatataccgccctttgtaaatcccattgtagtctgttgtcgatgattgtttaaagtaagcttctttaatcactgcggcacttctttttggataatggacatttacaatttgaacaggtgtcggctttttgtgtataacggcaatttggtttgtcagataatacttattcgtttcgtttaagtcatcttcgagggtcattccgcgattactgtaagacggggcccttttctgactgttttgggatgaaaccgaatgtttcggctgaaatgtttttccattaggataccgaatcactttctcatcctccttattaaactaatcatgacggaagtgaatgaacgtgcaagaacaacaggccatcagaaagcttctgagccggattgagcggcagacaaaaatgaaaaacgcggataacatttcaagaacaaatgcttataaagcattttacgaccgtcatccggaaatcaaatggtcgcttttggcttctttcgtttctcgtaatgccggctggtcaatgactgacttaaaaggcagtctgtttcagcttggactccgtgagagacagcaaaaatggttctttttagcctatgaaagagcgaactggcttattttttcggatgcctatccgcagcttcttttataccactggtcaaaaagagttgggaaaccgctgtttcatctgctgcatgtgtttggcgtctcacaatttatgtcggaagaatggacccgtttttggcatgagcgaaatacggagcggctaatgtatgccctcattataaatgaacaaaacactatccaaacacctattatacaaaatccttcgtttaaaaagaatgtttttgacacgattcctttttatttaagtgactggtttcattttaacaccgttatttttccttcctcaaatgggtttttttacggcatttcagtgaaacgcttttcaaagacggaggaaaggataaggctgggaaagcagctgtctcaattgctgttcaagccagaattgttctcctctttttatcactttttgcacacagtgccgcacacaggttcccgttttgatatggaaaagatgatcgggattacaaaaagaacatctcctatgctaaggacatgctaccctgagttaatccactcattagacggaacgaaaacagattggtttcatggaaagataaagaaaacgttctttaggcgcgaggaattgccgaagcagattgaattgacagactggtatttacataaaaagcgccagcttcatgcgctttttgcggtggagcagtggctgaaaaaataaagaagcaaggaaattccttgcttcttacgtagaagggcggttcgggccgcctaattttttatctaaagaatcgattgcctttgattcagtctttttttgctggccggcttttttcggtcttgttttcatacggcacctcctcacaagtatcgtttgcattaatgaggaggatcatacaatttttgcgggtgtttttgtcgaaaacttcagcttttcgtggaatacctgtttgtttggcgatttgcttctagttttgtcatgaggaaggaaagagccttgagagcaaagaatgttaaccgggagagacaaggaaagggaggtacacgaatgtccggttatgtatgcaagacagatattctccgtatgctttctgatatagaagatgaattaacgcgagctgagcaaagcctgaatcattctgtaaatgcattagaggctgagatgcgggaaacggagaacgatcgcctaagtgtgctcgaagaagaaatcatagatcttcatatttgtataaatgagctgtatcaatcgcctgaacacaggtatgcgtttgagaaggtataccgcatcggctgaatttgtgagtgaaatttggtacgataggcattgaggtgaaagatattgctatcacaaactttgctggaaatgaccgagcaaatgattgaagttgctgaaaaaggcgctgatcggtatcaggaaggaaaaaacagtaatcattcttatgatttttttgagacgataaagcctgcagttgaagagaatgatgaactggctgctcgctgggcagagggtgctcttgaattgataaaagtccgccggccaaaatatgtgcataaagagcaaattgaggccgtaaaggataatttcctggaattggtccttcaatcttatgttcatcatattcataaaaaacgattcaaggacatcactgagtcagtcctttatacattgcacgcagtaaaggatgaaattgcaagagaagacagccggtaaaaggctgtcttcttttcgtttttatagggggccggacgttaattcatctcatatgccgggctttctgctccatttgcttcgagaaccttcatactgttacgaaactcagttatgctgagatgtccttgaatatagaggaacttggcaaagtccatcagtttattcatacagtctgtttcatatttcttcatttctgcaaaacgtttgcttaagtatgatacgttcattatggtgcatcccctctcatctgtattgaaaatatggtaccataatgattcgacttttttctgtttttaaaaaatttaaactttcgacacaatttgacaaatgctaatcatcacttgtgacacaaacaatagaagtcattcatacatatatagaagagaaatatgttgtgtttaggggggaatcgcaatgaacgggagctctcgaagctatcctcggcaaatgggctattattatcctcagcatatgcaaggatattatcagcaggctgcacccggttatttagagcaacaactgcctcagcagcattatggacagcaggattattatcagccttatgctccgatccagcctatgcctatgcagccgcctgtattttctaacccttatcctatcccaaggcctaatcaacagcagccttcacaatttcaaagcattatgtcgcagttcaaaaaagccaatgggcaatttgattttaataaaatgatggatacgacaggtcaagtaatgagtgcaatgaatcaggtcggatctttaataaagggatttaccagcttttttaaatgatagaagcatgaatgaatcgttcattcatgcttattttttggaaagaaaagtgtcattgtctgctcgttccaagacgtttccatatcttcttggcgaacttcataaggcagctgaaccgttcttgtcatgcttgtaaaggtagcctcattttggtgtttctgtttttcttggagtgttacatggagatacctcgatttaacatcaacgacgatctcgccatctcgaaacgtcgccggaatggtaatatcgatatacagcccagtatctctttctctgacatgtatggtcgtctgcacatcctttaaactcgagttgatcaggttctgaaatccgtttataaggttgccgaacgctgaggattggaaaagagtgtcgattgcctccgttatgatttcttctttcttttgcagttcgttctttttgtcatcatagaattccaatttcgccaccgccttttttaaccagattatgcgtctatgccagatgttgttataaattgaagcaaaattgaaagtgtggttaaatagtggtgaatgaagggataacggttgaagtgaatgagaagggagaaaatacattgctgaaaaaattattcggaatgggcaaaactcaggaaaaggtgacagaagaggttatttattctccggcagacggtacagtaatggacctgtcagatgtgccggaccctgttttttcacagaaaatgatgggagaaggaatagccgtggaaccttctagcggtgaaatcgtttctcccgctgaaggtgaagtcattcagattttccacaccaaacacgccgttggcattcggactcgctcgggaattgagctgttaattcatgtcgggctggagacagtcaatatgaacggagaaggatttactgcccacattaaagaaggggataaagtgaaggtcggtgacccgctgattacatgtgatttggaattaataaaagaaaaagcgagcagcacagtcatcccaatcgttataatgaatggtgaggctgtaggatcaatggtaccggcaggcgaaaaggctgctcgtaaaggcgaatcaaagctccttacaataaaagcgaaataagcagggcgtatgccttgctttttttattcaactgtataaaatttgcacctagccatgcaaacaaatattcggtaaactgtacttgacaaagaggtgtaaagaatgaaaaagaaatcactgactgaactcatttctgatttaaaaggaaatgaaaacgttgtgaattggcatgaaattgagcctcgggaagcaaaaacaaggcctatgcccgaaagtatagacgagagaatcaaagcggccctttcgaaaaggggcattgatgaactatatactcaccaatattccgcttttcaatatgtgcaaaaaggagagagcatcgttaccgtaacgccaacagcatcaggaaaaacgttatgctacaacctcccagtcctgcagtccatcgcccaagatgaaacaaaccgggcgttatatttatttccgactaaagcgctggcacaagaccaaaagagcgagctaaatgaaattattgatgaaatgggcattgatattaaaagctttacatatgacggggatacgtctccggcaatcagacaaaaggtgagaaaagcaggtcatattgtcattacaaaccccgatatgctgcattctgccattctaccgcatcatacgaaatgggtcagtttgtttgaaaaccttaagtatatcgtcatcgatgagcttcatacgtatcgaggtgtgttcggcagccatgtggcaaatgtgatccggcggctgaagcggatctgccggttttatggaagtgatccagtttttatttgtacttccgcaacgattgccaacccaaaggaattgggagagcagctgacaggcaaaccgatgcggctggtcgatgacaacggcgcaccgagcggacgcaagcattttgtgttttacaatccgccaattgtgaacaaaccgctgaatattagaaggagcgcaaccgcagaagtgaatgaactggcgaaagagttccttaaaaacaaagtgcagaccattgtttttgccagaagcagagttcgggtggaaattattttaagccatattcaggagcttgtgaaaaaagagattggaacaaaatcaatcagaggctatcggggaggctatctgccgaaagagcgaagagaaatcgaaagaggactgagagaaggcgacattttaggagtggtcagtacgaatgccttagagcttggtgttgatatcggccagctgcaagtgtgtgtaatgacggggtatcccggaagtgttgcaagtgcttggcagcaggcgggacgagccggcagaagacacggtgaatctttgattatcatggtagccaattcaacaccgattgaccaatatattgtgcggcatcctgaatatttctttaatcgttcgccggaatctgcaagaatcaatccggagaatttgattattttagtagaccacttaaagtgtgcggcttatgagcttccttttagagctgatgaagaatttggagccatggaagtcagtgatattcttgagtatcttcaggaagaggctgttcttcaccgcaacggcgaacggtaccattgggcaagtgagtcgttccctgcgtcaaacatcagtttgcgttccgcctcccaggaaaatgtcgttatagttgatcagtcggatattgcaaatgtaaggattatcggtgaaatggaccgttttagtgcgatgacgcttttgcatgatgaagcgatttatttgcatgaaggcgttcagtatcaagttgagaagctcgattgggaccataaaaaggcgtatgtcagaaaagtcgatgtcgaatattatacggatgcaaacctggcagttcagctgaaggtattagaaatcgataaaacgaaagaaaaaagccgtacgtcattgcactacggagacgtcactgtcaatgccctgccgaccatttttaaaaaaataaaaatgaccacttttgaaaatattgggtctggacctattcatttgccggaagaagaactgcatacaagtgcagcttggctcgaaatcaaaacagcggatgaagacatcggggaaaagacactggaacagctgcttcttggcatctcgaatgtgctgcagcatattgtccctgtgtatatcatgtgtgatcgaaatgatgttcatgttgtttctcaaattaaagcagcccataccggattgccaaccatatttttatatgatcattatccgggcggtatcggtttggcggaggaagtctttaaacgtttttcagacattaatgaagcggcgaaacaactgattacacattgtccttgtcatgacggctgtccgtcttgtataggtacggaaatagaagggataaaagcaaaggaaagaattttgcagctgttggatcaaatgtcgtaaggagggaggccggatatgtcattaaaagggaaactccaacggatgaaaaagcacatggcgctcgacgaaggagaacaaaaaatagaagcaggcaaacaagaaaaccactttgatgacatcccgtttttagaagagtgggaggcttttggcatgaagcctttcatcttcgaagatgaatattgcctcatcagagaagtagaatatccgctttctcaccgccatgggttatacagcttttctgagcttgaggaagtgatcacactgtggaatcaaagcggcctgtcgcatacattgtcagcaaaagggtataacaaaaacaacctctttttctttgatacagaaacaaccggtcttgggggtggagctgggaataccatttttttgcttgggcatgcgagagtatatgaagaccgagtgacagtcaaacagcatcttttgcccaaaccggggaacgaagtcgccttgtaccaaagctttttaagcgaggttgacattacatcacttgtgacctacaacggcaaagcctttgattggccgcaggtgaaaacaaggcacaccttgatccgtgacagacttccgaagcttccggagtttggccactttgatcttttgcatggagctagacgcctgtggaaacacaaaatggaccgtgtatctcttggcacggttgaaaaagaggagctcggcatccgcaggctagaagacacaccgggctacttggcgccaatgctttactttcattttatcaaggcgcaagagccggatcttttaaaaggtgtcctgcatcataatgaaatggatgtgttatcactcatttcattgtacatccatatgtctaaaaaaatcctttcagaatcacatgcgccaaaagaacacagtgaagcctatgctatggcgaaatggtttatggctcataaagaaacggaccaagcgatcaagcagttggaaaggcttatagaaaaatcgtttgaggaccaggacagtgcacggctggatttatcgctcctgtacaaaaaacaaaaccgcttggaagaagcagtgccgctttgggaaaagctgtcccgctcgcaaaaccagaagtgcagatacgctgctgtaatagagctcgcgaaatattttgagcataagaaaaaagaattcggaaaagcattgcaagtagcagagcaatcgcttagcgatgcggcatgcttatcagagaaagaaactgaaaaactgcatgtgagaattgcccggctaaagaggaaatattcctcttaaatattccccgggaaagcgcaaaagacgacttgtttcgccatgaatttttttgctgaattcacattgattttgttgtagaatagcggcgaatcctgtaaaatgacgttagttatttttaaagggagagttggtatgtataagggtgttttttacttgttctttgttgtggtatttttgattgcttttgtattttcaaactttaaagacagcttaattgcacacttttaaaataggtctttgcatcagaacatgtaccccttatttttcatagcttagtattgtaataaagtttatggaaaggggattttatcatgcatcactgcagaccgcatatgatggcgccaattgtccatcctactcattgctgtgaacaccatacgttttcgaagactatcgtgccgcacattcacccacagcatacaacaaacgtaaaccaccagcattttcagcacgttcactactttccacacactttctcaaatgttgacccggctacgcatcagcattttcaagcaggaaaaccttgctgcgactactagtatggaaacgtgcagcttgatggtgtaaacaatgcagcacaacaaatggggcccacgggagccccattttttaaagcaggtgaaatgatgaaagtactggcaattacgggctataaaccgtttgaactcgggatatttaagcaggatgacaaggcgctgtattacataaaaaaagccattaagaaccgactgattgcttttttggatgaaggattagaatggattttaatttcgggccagcttggagcggagctgtgggcggcagaagctgcatatgatttgcaggaggaataccctgacttaaaggtagctgtcatcacaccattttacgagcaggaaaagaactggaaagaaccgaataaggaactgtatgaagcagttctggctcaggcagactatgaagcaagcctgactcaccgtccttatgaaagcccgcttcaattcaaacaaaaaaatcagttcttcattgataagtccgacgggcttctgcttttatatgacccggaaaaggaaggctcccctaagtatatgcttgggacagcggaaaaaaggcgcgaaaaggatggctatcccatctactttattacaatggatgacttgagagtgacagtagaggaagacagctactcatagcaataagagaaatttgacaaccgtacagatttctgaaaaaatatatgtgatgattcacgatacgaggtgaaaaagatgcttgctgataaagtaaagctttctgcgaaagaaattttggaaaaagaatttaaaacaggcgttagaggctacaagcaagaagacgttgacaaatttttagatatgattattaaggattatgaaaccttccatcaagaaattgaagaactgcagcaggaaaatctgcagctgaaaaaacagcttgaagaagcaagcaaaaaacagcctgtgcaatctaacacaacaaactttgatattttaaaacggctgtctaacttagaaaaacacgtttttggcagcaagctttatgattgatcacgcttgaaaaaaatggcgcttgtaaattgtaatcagttgttatataataattcatgttcttaacgttcgggtaatcgctgcagatcttgaatctgtagaggaaagtccatgctcgcacggtgctgagatgcccgtagtgttcgtgcctagcgaagtcataagctagggcagtctttagaggctgacggcaggaaaaaagcctacgtcttcggatatggctgagtatccttgaaagtgccacagtgacgaagtctcactagaaatggtgagagtggaacgcggtaaacccctcgagcgagaaacccaaattttggtaggggaaccttcttaacggaattcaacggagagaaggacagaatgctttctgtagatagatgattgccgcctgagtacgaggtgatgagccgtttgcagtacgacggaacaaaacatggcttacagaacgttaaaccacttacatttaaaattatgaaaacaagctctcccgtataaggagagcttttatcttgaaaagagaaaagttttaaaagacagggtgatacgatgaagaagtatacactaattgcaacggcgccgatgggcattgaagctgttgtcgcaaaggaagtacgagatttaggatacgaatgcaaggttgataacgggaaagttatttttgaaggtgatgcacttgccatctgccgtgcgaacctttggcttagaacagccgaccgcataaaggttcaggttgcttcttttaaagcgaaaacatttgatgaactgtttgaaaaaacgaaagcgattaactggcgctcatttatacctgaaaacgggaaattccctgtcatcggaaaatcggtaaaatcaacacttgcaagcgttcccgactgtcagcggatcgtcaaaaaagcaattgtcgaaaagctcaagctgcagtccggcaaagccaatgattggattgaagaaacaggtgccgagtataaagtcgaaatttctttattgaaagatcaggctttgattacactggactcatcagggacaggccttcacaaacgaggataccgtgtcgatcagggcggtgcgccgattaaagaaacacttgctgccgctttggtgcaattaaccaattggacgccggaccgcccatttgttgatcctttctgtggctccggaacaatcgcgatagaagcggcgctaatcggccaaaacatcgccccgggattcaatcgcgattttgtttcagaggattgggaatggatcggtaaagatctgtggaacaaagcgcggcttgaagtcgaagaaaaggcaaattatgatcagccgcttacaattttcgctagcgacatagaccaccgcatggttcaaatcgcaaaagaaaatgcagaggaagcaggattgggagatctaatccagttcaaacagatgcaggtcaaagactttaccacaaatctggagtttggcgtaattgtcggcaacccgccatatggagagcgtctcggcgagaaaaaagccgttgagcagatgtacaaagaaatggggaaggcgttcgagccgcttgatacttggtctgtgtatatgctgacatcaaatgaaaactttgaggaagcatatggcagaaaagcaacgaagaaacgaaagctctttaacgggtttattaaaacggattattatcaatattggtcaaaagtaaggccgcagcgaaagaaaacagaaaacgcataaaaagaagacgctctgcatgcgtcttctttcatctttcagccctattctatcgttaccaacggtgagctttcgcgttgcttctcaatataatgttggtttgggacatttcagtatgaccgtttacttgagacttagaacgtttaggccgcgtccaattgtgatgaaacagttcagaatgctgatctaatcggtttctataactcatctcaacatcactccctgatagaatattgttgataagacggataatccggagacggaatatcaagtgtagtttgtgcatgtttcggtgataacatgcggtaaagcatgtatataaaatgaaaagttcgcatacaatgatgattatttccatcagaggtgatctcatgctgaacagcgaacattttaatcttattcaaagggcgcttgacgcaacagcaaacgagctgaaggagctcgggactgattcgtctccgtctgtgatttcgcatgcgcaaactgatttagaaaaagcggtagaacatatttattcaacagaccatccttttttatcgtcgcatgtgatcaatcgtaagtaaactgcaaaaaacttggcattgccaagttttttattgtattcatcagcggaaaatgatattattggtggtctgaatgtcgaatagttgggggttggaactaggtgacaacatcacgtttgcctttttctttaacgaaaacaaagaatttttatgaagaattgaacaattggattggtgacgtgttttacgatatccttcccgaaaaagggtttgatcttcgggacgagcaagtatttatggcttttcagctggagcgggcgtttaaagagaaaaaagtcatgttcgccgaagctggagtgggaacggggaaaacgctggtatatcttctttttgcaatcagctatgcaaggtatgtcggcaaacctgccatcatcgcttgtgcagatgaaacattaattgaacagctggtgaaaaaagagggcgatatttctaagctggctgagcatcttgatctgaaaattgatacaaggctgtcaaaatcacatgagcaatatttatgcttgaagaagcttgaaaaaacaatgcagcgttctgatgatgataaatggctggatctttatgagtcgttaccgtcatttgtccacgagtcccaggcgatgcagcgcttttatccgtatggcgaccgtaagcagtacgcaaatctatcgaatgaagagtggtctgacgtaagctacgactcgtttcaggactgtctgacttgtgatatgagacacagatgcggtctgacactttccagagattactaccgcaagtcaacggacttaatcatttgttcccatgatttttatatggagcatgtgtggacggaagaatcacgcaaacgagagggccagctgccgctcttgcctgatcatagtgcagttgtatttgatgaggggcacttgttagagtttgctgcgcaaaaagcgctaacctatagagtgaagcagtctactcttgaattgtttttagaacgattgctgcaaaatgacatcagagaagagtttgcagaattgattgaagatgcgcttctcgcaaacgacgaatttttctatgttctttctgaagaatcaaaggaagtagccggttcacaccgtttagaaataaaaaatgaccatcgtgtcaaaaaggcggcggacgagctttgccgtttacttgataaaatcggtgaggcacttgtatttgagtctgaaatgtatacgattgatcaatacgaactgtcagtagtggaagaatatgttgaacaaatggcgtattcattatctctatatcaaaaggatgcgatcagctggctggagaaaaaggaagcagaatcaacctttgtcgtgatgccgagaacggtagcagaagtacttggcgaaaaagtgttttctaagaaaattccttatatcttttcttctgctacgctgtcagaaggcggttcgtttgattatattgccgacagtcttgggattcatgattatttgtcattaactgttgattccccttatgattatgacgagcaaatgagtattaatctatacgcaaaaacagatatggacgctgaacaaaaaacggctgaaacgattgaaacaatcaaacgatacaaaggaagaacgctggtgcttttcccttcttttgaagaattaaacgagtttaaagagctgtcggcggcatgggagctgccgtatccaattttcttcgaaggtgatgaggaaatcagcagcttagtagagaaattccaagaggaagaagaaacagtactttgttcagttcacttatgggaaggactcgacattcccggtgacgcattgaagaatgttaccatttggtcattaccgttcccgccacacgatcctgtatttacagcgaagcgcaacggagcgaaaaaagatccgttcgaagaagttgatctgccatatatgttgttacgtgtacggcagggcatcgggcgcctgattcgctcgaatcaagacagcggctcgattcacatttacgctggcggagaaaatgaacgcatcattgatgaggtcaaaaaggtcttgcctgttgaaccgcacatgatgtaatggaaaaaagctgacgatcgttcgtcagcttttttatttgtcagcgggatagccagccgccatcaactgctaaaatatgtccatttacataatctgaagcacgtgatgccaaaaagactgcagtccccccgatatcatccgcttggccccagcggccggcaggaattctctttaaaatgtcctcatttcgcttttcgtcatcccgaataggctttgtattcgcagtagaaatatagcctggggcgattgcgttgacctgaatacctgacgctgcccactcatttgcaaatgattttgtcaaaccggcaacagcgtgtttgctcgcggtgtaagccggaacgaggatgccgccttgaaaagacaggagagaggcaatattaataatctttccatgacctcttttcagcatgtgcctgccagcaagctgtgtcagaataaacaggctgtttagattgacattcagtacgtgctgccagttctcttctgaaaaatcttccgctttttcccgatgaataatgccggcattattgacaaggatgtggatctgcctgttttcaaacagctcagctgcagaatcctttatcgcttccggcttgctcatgtccaatgtaaaagatgtaaatatccggccttcctgttccacaagctgctgtgtttcagacaggctgcttttatgtgatgtgccgataatatcagcgccagcaccggctagggctttggcaattccttgaccgatccctgttccagggcctgtcaccagcgctgtttttccttctaatgaaaaggcgtcatgtagataacccatcttatttcagcccatccatcggaacgagatccatgtccgtaaatgtgtaattttctccagccatcgcccacacaaagctatagtttgatgttcctgcgccagaatgaatagaccaggcgggagaaaggacagcctggtcatttccaacaacaagatggcgtgtttcgtccggctggcccatgaaatgaaatacctttgaatccttttcaagatccagataaagataagcctccatccgacggtcatgaacgtgtgctggcatggtattccagttgttgttttgatctaacatcgttattcccatcatcaactgacagcttttaatgccatcctgatgaatgactttgtacagacttctgacattagacgctgcatcatcaccaaggcggtccggtgtcagttcagctagggcggctttttgtgtcggatagcttttgtgggcgcaagcggagacgaagtaaaacttcgctttttcaccgttcaggcttgaaaatgatacatcctgattacccattccgatatagagaaaatcctttgtttgaagcacatattcatcatcgccgactctaacggcaccaggctggccgacattaataatcccgatttcacgccgttccaaaaagaagtctgtttttagaaaatcacctgcatcaagcttcagttcactttgccctggagccgctccgccgatgacaacccggtcttcatgtgagtaatacatcgtaagtttgttttctgtaaataaagaatccattaagaaatgactgcgaagctcctctgttgtaaagcgttttacttgttcaggatgtacagaataacgattttccattatatttcccccttggttaggatttcagcatcacttgaatgaaaatattttggtaacggtttcaaagaaaattttaggataaatagtgaaaagagtcaacgaaaaaataatgaattgacacattattaaaaaaactcttcccaaattttaaaattatggtattcttttgttgtaacggttttgaaatcggtttcaaatataagagatacaggagcacttgaatgaaaaagaaaacaacaggccatacaaccatcaaagacgtagctgaatgtgcaggagtttcgaaatcgacagtttcccgctatattaacggaaaaattgacgcgatttctcctgaaaaagtgaaaaacattaaaaaggcaatcgcagaattgaattatcggccgagtaaaatggcacaaggtttgaaaataaaaaaaagcaagttaatcggatttgttgtggctgacattacaaatcctttttcggtcgctgctttcaggggagtcgaagaggtttgtgatcaatatggatacagcattatggtgtgcaacacagataacagtcctgaaaaagagcgggaaatgctcttaaagctagaagcccattcggttgagggcttgattttaaacgcaacaggggaaaacaaggatgtactccgcgcttttgctgaacagcaaattccaacaatcttaattgaccggaaactgccggatctgaaactggataccgtaacgactgacaacagatggatcacaaaagagattcttcagaaggtgtacagcaaagggtatactgatgtcgcgctgtttaccgaaccgatttcctctatcagccctcgtgcagaaagagcagctgtgtatcaggaaatggcttcggttcaaaatgtgaacgggcttgtcagattgcatgaaattgacgtaaaggacaaggagcagcttaaggcggagcttcgttcttttcacaaggaaatgccggagcaaaaaaaagcgattctggctttgaatggcttgattatgctgaaaatcatcagctgtatggaagagcttggcctgcgcatccctcaagatatagggattgcaggattcgatgatacggagtggtacaaactgatcggtccaggcattacaacgatcgcccagccgtcacatgatatgggcaggacggcgatggaacgtgtattaaaaaggattgaaggtgacaaaggagcgcctcaaaccattgaattagaggcaaaagtcatcatgagaaagtcactttaatcctaggtgccctcaactaagaggaggttgggaagagatgaagcttgatgcggtgacattcggggaatcaatggccatgttttatgcaaatgagtatggaggccttcatgaagtatccactttttctaaagggcttgccggagcagaaagcaatgtcgcctgcggccttgccagactcggatttcgaatgggatggatgagcaaggtcggcaatgatcagctcggaacgtttattttacaagagcttaaaaaagagggagtggatgtgtcccgcgtgatccgctcgcaggacgaaaatcccaccgggctgctgctgaagtcaaaagtgaaagaaggcgacccgcaagttacctactataggaaaaactcagctgcaagcacattaactacagctgaatatccgagagattattttcaatgcgcaggccatttgcatgtgacaggtattccgcctgctttatcagccgagatgaaagacttcacgtatcatgtcatgaacgacatgagaaacgcagggaagaccatttcattcgaccctaatgtaagaccttcgctttggcctgatcaagcaacaatggtacacacaatcaatgatctggctgggcttgcagactggtttttcccgggtatcgcagagggagagctattgaccggagaaaaaacacctgaaggcattgccgactattatttgaaaaaaggtgccagctttgttgctattaaacttggaaaagaaggcgcttactttaaaacggggacaagtgaaggatttctagaaggctgccgggtcgaccgggtggttgatacggtcggcgccggagacggatttgcagtcggtgtaatcagcggtatcctagacggtttgtcgtacaaggatgcggtgcaaaggggaaatgcgattggcgctttgcaagtgcaggcaccgggggatatggacggtttgccgaccagggagaaattagcttcttttttatctgctcaaagaacggttcaccaaaagaaaggggattattaatatggagtccaaagtcgttgaaaaccgtctgaaagaagcaaagctgattgcagtcattcgttcaaaggataagcaggaggcctgtcagcagattgagagtttattagataaagggattcgtgcagttgaagtgacgtatacgacccccggggcatcagatattatcgaatccttccgtaatagggaagatattttaattggcgcgggtacggtcatcagcgcgcagcaagctggggaagctgctaaggctggcgcgcagtttattgtcagtccgggtttttcagctgatcttgctgaacatctatcttttgtaaagacacattatatccccggcgtcttgactccgagcgaaattatggaagcgctgacattcggttttacgacattaaagctgttcccaagcggtgtgtttggcatcccgtttatgaaaaatttagcgggtcctttcccgcaggtgacctttattccgacaggcgggatacatccgtctgaagtgcctgattggcttagagccggagctggcgccgtcggagtcggcagccagttgggcagctgttcaaaagaggatttgcaggctgttttccaagtgtaagtggaattgttttttcataaccggaggatgggagaatccacaatatgaaaatcaaggcgacaattgaacgggtacctggcggaatgatgattattccgctatttcttggagcggcgctcaacacgtttgcgcctggaacagcggagttctttggagggtttacgggtgctttgattaccggaacgctgccgatactgggtgtttttatcttttgcgtaggagcaacgattgattttcgttcttcaggctatatcgcaagaaaaggaatcacgttattattggggaagatcggatttgcggcgctgctcggcgtgatcgcagcgcaatttatacctgacgatggcatacaatccggcttttttgcaggcctttctgttttagcaattgtcgcggtaatgaatgaaacgaacggcggactgtatttggcgctcatgaatcacatgggaagaaaagaggatgcgggcgctttcgcctttatcagtacagaatctggtccttttatgaccatggtgacgtttggtgtgacgggacttgccgcattcccatgggaaacgctggcagcgacagtcatcccgtttttacttggatgtatacttggaaatctggatcatgatctcagagacttattcagcaaggttgtgccggcgatcattccatttttcgccttttcgctcggcaataccttgaattttggaatgctgatccaatcagggctgctcggcatttttatcggagtttctgtcgtcattttatcgggcagttctttgtttttgcttgatcgttttattgcgcggggagatggtgtcgcgggagtggccgcttcttctacggcaggggcggctgtagccgtgccatatgcattagcggaagcgaatgcctcatttgcgccagttgctgagtcggcaactgcaattatcgcgacaagcgttattgtcacctcgctcttaaccccgctggcaacagtgtgggtagataaaaaaatcaagcagaaaaagcggagaacacctccgccaaaaaatcaaatgacgatcaactgaataaaaaggctgccacaaaacataccggcagccttttatacaaacaatttgactttcatacccccttccattagcctgtaatggaacggctagaatagggagggaatggatatggagatacatacatatgaaaaagaattttttgatcttttaaaaagaatctcacattacagcgaagcagttgcgttaatgcactgggactccagaacaggcgcgccgaaaaatggctcagaggatcgtgccgaaagtatcggccagctttcaacagatatattcaatatccaaacatcagatcgaatgaaggagcttatcgatgtcctgtatgaacgatttgatgacttgtcggaagatacgaaaaaagcagtggaactggcgaaaaaagagtatgaagagaataagaaaatccctgaggctgaatacaaagaatacgtgattctgtgttcaaaggcagaaacagcgtgggaggaagcgaaaggaaaatctgatttcagcttgttttctccttatttagaacagctgattgaattcaataaacgttttattacgtattggggatatcaagagcatccttatgatgcattgcttgatttgtttgagcccggcgtcacggtaaaggtgcttgatcagttgtttgctgagctgaaggaagcgattatccctcttgttaaacaggtgacagcttccggaaataaaccagatacaagctttattacaaaagcgttcccgaaagaaaagcaaaaagagctcagtctgtattttttacaggagcttggctacgattttgatggcggaagacttgatgaaaccgttcatccgtttgcaactacgctgaatcggggagacgttcgggtcacgacgagatatgatgaaaaagatttccggacggcgatctttgggaccattcatgagtgcgggcacgcgatttacgagcaaaatattgatgaagcactcagtggcacgaacttgtcagacggcgcatcgatgggaattcatgaatcgcaatcattattttacgagaattttatcggccgcaacaagcatttttggactccgtactataagaagattcaagaggcatcacctgtacagttcaaggacatctccctggatgattttgtccgggcaatcaatgaatcaaaaccttcatttatcagggtcgaagcggatgaattgacgtatcctcttcatatcatcatccgttatgaaattgaaaaagcgattttcagcaatgaagtgtctgtggaagatctgccgtcgctttggaatcaaaaataccaggattatttagggattacaccgcagaccgacgcagaggggattttacaggacgtccattgggcaggtggagatttcggctacttcccatcctatgcgctcggctacatgtatgcggctcagctgaaacaaaaaatgcttgaggatctccctgaatttgacgctctcttggaaagaggagagttccatccgataaagcaatggctgacggaaaaggtgcacattcacggaaaacggaaaaagccgttagacattattaaagatgcaacaggagaagagctgaatgttcgctatttaattgattatttatcaaacaaatattcaaatctctatctgtcataatcaaaagcctggcggcgcggtcgtcagactcttttatatcgaatccccttgaaatacgaatgatatctaaaaaaacaaaattaaagttcgggaatttttattttcagcctatgcaagagattagaatcttgatataatttattacaatataataggaacactcatataatcgcgtggatatggcacgcaagtttctaccgggcaccgtaaatgtccgactatgggtgagcaatggaaccgcacgtgtacggttttttgtgatatcagcattgcttgctctttatttgagcgggcaatgctttttttattctcataacggaggtagacaggatggaagcactgaaacggaaaatagaggaagaaggcgtcgtattatctgatcaggtattgaaagtggattcttttttgaatcaccaaattgatccgctgcttatgcagagaattggtgatgaatttgcgtctaggtttgcaaaagacggtattaccaaaattgtgacaatcgaatcatcaggtatcgctcccgctgtaatgacgggcttgaagctgggtgtgccagttgtcttcgcgagaaagcataaatcgttaacactcaccgacaacttgctgacagcgtctgtttattcctttacgaagcaaacagaaagccaaatcgcagtgtctgggacccacctgtcggatcaggatcatgtgctgattatcgatgattttttggcaaatggacaggcagcgcacgggcttgtgtcgattgtgaagcaagcgggagcttctattgcgggaatcggcattgttattgaaaagtcatttcagccgggaagagatgaacttgtaaaactgggctaccgagtggaatctttggcaagaattcagtctttagaagaaggaaaagtgtccttcgtacaggaggttcattcatgagaaatggattcggcaaaacgctgtctttagggattcagcatgttcttgccatgtatgccggcgccattgtcgttcctctgattgtcggaaaagcaatgggactgactgtcgagcagctgacttacttagtatcgattgatatttttatgtgcggtgtggctacacttctgcaagtgtggagcaaccgattttttgggatcgggcttccggtagtgcttggctgtacctttacagctgtatcgccgatgatagcgattggatctgaatatggggtttcaacagtttacggcagcattatcgcttcaggcattcttgtcattcttatttcatttttctttggaaagctcgtatcgttttttccgccggtcgtgacaggctctgttgttacgattatcggtattacactgatgccggttgccatgaataacatggccggcggagaaggaagtgcagatttcggagatctctccaatcttgcacttgcttttaccgtgttgagtatcattgtgcttctataccgttttacaaaaggctttatcaagtccgtctcgattttgatcggtattttgattggcaccttcatcgcatattttatgggaaaagttcaatttgataatgtttcggacgcggcagttgttcaaatgattcagccattttacttcggagcgccgtcttttcacgcagcgcctatcattacgatgtccatcgttgcaattgtcagccttgtggagtcaactggtgtttactttgctttaggtgacctgacaaaccgccgtttgacagagatagatttgtctaaaggctatcgagctgaaggactggctgtgcttctgggcggtatttttaacgcttttccttacacggcattctctcaaaatgtcgggcttgttcagctcacagggatcaaaaaaaatgccgtcattgtggtcacaggtgtgatcctaatggcatttgggctgtttccaaagatcgctgctttcacgactattattccatccgctgttttgggcggtgcaatggtggcgatgtttggaatggtgattgcttacggaattaaaatgctcagccgcattgattttgcgaaacaggaaaatctgctgattgttgcttgctcagtgggattggggctcggtgtgaccgttgtgccggatattttcaaacagcttccgagtgccttaacgctgcttacaacgaatggcattgtggcgggcagctttactgcagtcgtcttaaatattgtatataacgttttttctaaagctaaaaaaatagaacaagaagctgacctcgctgaacaaaaaacagcagtctaactccgccgcggcggagttttttttgcatataaaaaagattgttgcggcacaatgtatgcaaagaggtgatcgcatggcgtttattttatccattggaacaagtcttcctgcgtataatgtaaaccaagagaaagcggccgagttcgcccgctatatgtttcagcattcttttaaggatattgacaggctgttatcctcctttaaaaacgggcaaatccattcgagacagtttgttaagccgattgaatggtataaagaggggcacagctttgaagaaaaaaatcaaatatacatagaagaaacacttaaacacagcagagcggctgttcgtgagtgcctctctcatccggaattttttcaagaagccattccttatgagaaagtggaagctgtttttttcgtctccagtacaggtctttccacaccgagtatcgaggcgcggcttatgaatgaacttccgttttctccatatacgaagcggattccgatttgggggcttggctgtgcaggaggagccagcggacttgcgcgtgcagccgaatactgcaaagcgtatcctgaggcttttgtgcttgtcatttctgccgagctgtgcagcctgacattccagccggaagataaaacaaaaagcaatctgatcggcacctcgctttttggtgacggcattgccgcagctttattatgcggagagaaggcggaccgcagggtgtcaaagctgaagcttgcgccgaagataatggacgcccaatctgttttgatgaaacaatcagaagatgtcatgggctgggactttaccgatcaaggattcaaagtcattttctcacgagacattccgaccttggtggaaaaatggctcaaaacaaatgtacagatttttttggacaaacataagctgtcattccatgatatcagtgtttttttggcgcatccaggcggaaaaaaagtgatcgatgcatacatcaaaagtctcgggctgtcgtcagaaaagctttcatctgcgcaaagcattttgcaaaagcacggaaatatgtcttcagccacaatcttgtatgtgatcaaagaccatctgcagaacggacataaaaaggaagctgaacgaggactgattggcgcattagggccgggtttctcatcagagttgctattattcagctgggaaaagggggcctgactcatgttttggttgttgatcgccattctcattgttcaaagagcagcagaaatggcagtggccaggcaaaacgaacaaaaggtaaagaagcaaggagcaattgaatttggcgagagccactatccgtatatcattacgatgcatatcctttttttcctgtccttaattgccgaggtgctgctgatgaataaacagccgtccagctggtggctcggtatcgctgcagtgattttaagcgtacagatcgtacggtattgggcgctttgttccttaggagcatattggaatacgaaaatccttgttgttccaggtgtagagcttgtaaaaaaaggtccatataaatggatgaaacatccaaactatgccgttgttatcctcgaaattttgctgattccgctgctttatcaagcatacgtcaccatgtgtctgttttccattttcaatgccgtgttgttaagcgtcagaattcgcgcagaagacaaagcattacaggaatacagcgtaaaatagcgattgaaaatcattctcaaccatgttaaaatggatttgaaaaagattctcaatcaggatggtgaagcaaatgacaatgctgtttttgcttggagcggtttgtacatatagtgtattaattggttttgtattaaaaggaatctctaataaatctgtttgatgaatctggaacttgtaaaagttgcagattttcttttatagaagctgccgtaatggcggcttttttctattctcctaaagaaatttggtttattcttgtgtaaaatgaaaagggaatgaattcagatctttcaaaaaaggttcacaattgaaacggcacaaaggggttcagacttatgacagatcaaaacagaaaaaagcttttgcataaaactggggaactttataagcaatttattgagaatcaagatgaacaaagggctgctaaactggctgcggtcatgaaaaaagcggctgatgaagaggtttatatcgcgtttaccgggcattattcagcgggaaaatcgtcactgctgaactgcctgttaatggagaatattttgccgacaagcccgattccgacaagcgctaaccttgttgtgatcagaaacggggaaaagcgagttcggcttcatacaacagacggagcgtgtgctgagctggaaggggcttaccagaaagacaaggtgcagcaatattgtaaagacggggaacagattaaaagcgtcgaaatttttgacaggtatactgagatcgattccggggttgcgtatattgatactccagggatagattcaacagatgatgctcattttttatcggctgcttctattcttcaccaggcggatgcgctgttttacgtcgttcactataatcacgtgcacgctgaggaaaatgtaaagtttctcagatcaataaaagaaagcattccgaatgtgtattttatcgtcaatcaaattgaccgccatgatgagacggagacaaaatttggagactatcaagcgcaggtagaggagatgctttgcaatgaagggatttcaagggaagcgctctattttacatcagtaacagaaccggatcacccgttcaatcagatgggggccctgagagaagagttaagaagaatagaacagcaatcaaaaagcaatatgcaggctttaacggaacaaaaagtccgtaatctgctaaaggaacatacggaaatgctgaagaaagacgaaacaggcgctccgagtttcgctgaacagcttaatatccaaattggactggtccaatcgctgcgtgatcaattgaatgaggccgaaaaacaaacgactgaggcagagaagaggatgcaggaagaaatcaatcgtattttaaaaaacgcaaacctgacgccttttgaaatgcgtgaattggcggctgcatttttagaatcacaagagccttcttttaaaaccggctttttcttttctaaagcgaaaactgcacaggaaagagataaaaggcggaatgcttttttctctgatgtggcaaaacgaacagaggccgaagcggattggcatatgatagacacgcttcataaactcgccaaggtatttgatgtctataccgctgaaagtgaaaagctgattcaggcctatcgcacaccgcttgatataagcatcattgaacgcgcggtcaagcatggtgcagccttttcctctgaatatgtattgcaatatacaaaagacttagcagagctcatcaggaaagaggcgaaaagagaagccgcagacatcataaaggtgctctccgctatggtgaaagagcgtgtttccaaagatgtgcaaacaattaacgaccggctcgtccaagaatcagaaaaacttgtatttcttcaagaacaggcgtgtttagagaataatgcccgagagaaaaccgatcgcctgtgggccatttgggaagaagagtccgcatgcccaatgcatatagacacagaatggtttaaatcgaagaaaacaagagtggcggctccagagcagaaacaaggccgaagccagctgacggcgcagccgatgccgaaatcagaaatcaaaatggaacaagaaatgccgcttcaagaccaaatcaaacgcttttacactttgtctgaccttttaggcgaatgcagcatgttgttaaagcaaacttcagcgtttcgtgaaagggtgaaaaggcttgaggaacggaaatttacacttgctctttttggaggcttcagctcggggaaatcatcatttgccaatgcgcttgtcggcgaaagagtgctgccatcctcaccaacgccaaccacagcgacaattaacaagatcacaatgccaatcaatggcaacttaaacaaaacagcggatgtagtgtttaagacagaggatgacataacggctgaaattttgcagctcaccggaataccaaaggaaccggcaggccgttccttcacagagaagtgggaaaaggcagtcaaaaaaaacaggctgcaggaagaacacgtgaaattgatcagcaatttcctgcttgcatatgagaagtatcagcagtatatacaggaacagaagaaattaacgattccgctatctgaattaaagccgtatgtagcagaggaaacaacggcctgtgctgtgaaagaggtaacggtctactatacatgcccgctcactgaaaaagggattacgatcgttgatacacccggcgcgagcagcatgaataaacggcatacagaactggcattccaatatatcaaagatgctgatgcatttttttatatgacttattatcagcactctttttcaaaaggagaccgttcatttttgcgaaagcttggacttgtgaaagaatcgctcagcatggataaaatgttttttattattaatgctgcagaccttgcaaaagataaaacagagctcgaaacagtgaccgattatgtcagcgcagagcttgtaaaagaaggggtttatgagccgcagctctttaccgtatcaagtaaggaggaactggtgggaaaaccggagtcattttataatcagttcccgaaagtaagaaaacacttagaccggtttatcgaagtggatgtaaaaaaagcgtcagcagcgcagctcagttcggaggcagacaaactatgcgaaactgtttttcagcttcaccaatcccagcatcagtcccgagaagagaaggaagcgcagaaacagcgccttatgctgtcatttgagcggacagcggccgatatcgagaaacggcggaactcagaaaccatcattgaaaaagtaaaaaaagatacaagagagcagctatatcacattacacagcgattatcatattttgtaaatgatttattaaaatcggcatttcatcccgggctgcaaaacggggattggaaaaagaacgtcagtaaggcgatgacaacagccttacatgaatatcaatttgaatatattcaggaaatcaaaacgcttgatgttcgtatgagcggtttcatcgaacggcatatcaatgaagaatggctggatcaatttcaaaaaacattaaacgaggacggctatttttccgtttatgcgggtgatcagcattcaaacggcatacagttgaaggaagttgaaccagaaatagaagaacgtgcttttgagcaggaactaaaagaggtcaaatcaccgaagcagttttttgagcagaaaggaaaatcggcctttatcgaagctgtacggatgaaacttacgaaaatcacagaggcatggataaaaaatgaagaagaaagcctgatttctcattacacagctcacctcagacgcttacaggaagatatgggcgaaaaagcaatcgcgcaaataacggatcaaaaagagacatatttaagaggatatgcggaaggggaacatgcgaaagagattgaaatagcgtaccaggcgtgcatctcctggaaaaattcagacaatacaataaaaatgtaaaattcagttggcttgtatttcaagtcatggtagactaaatagaaaaaagcgagatgaacgattaatgtcagaggtacataaagcaatttcagcacattcatcaaaacagcacgagcatatcaaagcatttatgcgtcttgaaaatatgcgtgaattggcgattgaagaagctgttgcgaaatgcaaaaacgatgagccttatactacagaagcaattaatgaaattaccgagcaaatgaatcagctcgctaaaaaaggcatcgtcccgacaagacggcttgtatcaaaagaaatggtcagagaatacgtaagccgcatgtaagctggatgatcctgtcgcgagtgaacctcctgccggaagcatatactatatgcatccgacgtaaggggggattcatgttgggcagaacaaagctcggaaacagaaatgcacaggcgaataacaatgccaaaaagaaaaacggatttcaaacccattttgactcttacgcaggacgcgaagctgaaaagctgatcgccagcaacaaaagacacaacgattgataaatatccaaacagtatctctaattaaagagatactgttttttatttttgggctgctttatgataaaatagaaggaatgaaagaaaagggagttatttgatgaataataataaactattgctggttgacggcatggctcttttattccgggccttttttgccacggccgtacatcgcaactttatgataaatgacagcggggtgccgacgaacggcgtcaacggctttttaaagcatttgattacagctgtggaaacattccagccgacacacgtcgtctgctgctgggacatggggagcaaaacgtaccgaaatgacttgttccaagattataaggccaaccgcagcgcgccgcctgtggagctgattccgcagtttgatttggcaaaggaagcagccgcagagcttggaatcatgaatattggctttgccggctatgaagcggatgactgtatcggtactcttgccgatttatttgcgaatgaagcggacattacggtcgtaacaggggacagagatttacttcagctgttaacggataaagtaagcgttgctttgcttcaaaaaggaatcggaaattataaagtctatacaaaagagactttttatgaagaaacaggcgtaatgccgaaggctttgattgatattaaagcgcttatgggagattccagtgataactatcccggagtcaaagggattggagaaaaaacagcctacaaactgattcgtgaatacgaaacgattgaccgtttattggaaaatctttctcttcttccaaaaggacagcagggaaaaattcagcaaggtttaagcgatttggagatgtcgaggaagcttgcggaaattcattgctcagtgccgctggcctgcacactgaaagacgctttatttactttgcaaatggagcaggcggctgacatgcttcgccgccaccaaatcaaaggaattgagcgtatgcttgaaaagctgaacgctagagagatcgtttagatcttctctagcgttttgtattgcttttttttgctctctcctcaagctctgttttagggtcattatgtgtattgccttccaggtcgccttgcggagtaacaccgccggtcagccggcctttatctttctttttcatgttagttcacctcgccattaggatgaaccaatcatcaagatttaattcttttcattcagccgaatcgcttcttttgccagaagatcggctttttggttttgcttgcccggtatccatttgatgaaaaaaagagggaatgccgcttttaatcggatgatttcttctacgaacggttgaaacgttttatttttaaccatttcaagctcagtggcgcgttccacaatatctgaatcggttcgaaaggaaaccgattgatacccgcgcgttgcacatagcttcatcccttcaattaatgcaagaaattccgcttcctgatttgtatgcactccgattggaatagagaaggattctgctgttccctcatgtttgataaaaatgccgatacccgaaggcccgggattaccagcgcttgcgccgtctacgtatatttctgtaggcattatgaactcctttcatctttaggtatcatttttttggctgcataagcataaggcaatgaaatcaaagataccgcaaacttaatcaaatatgtagaaataaaaatatgaagccacacgcctgccggataaatgccgagaaaggcgactgcagtgaatatgaatgtatcaaacagctggctgactgctgtactgccgccgtttctgagccataaaagccgatcagaaggaaatatccttctaattgccgaatatacataaacatccagcgtttggctgaagataaaggcaagcagacttcctaacgcaactcgcggaaggaatccgaagatcgtttccagcgctgtttgtgatatgtcgctggaagccggttcgaaaagcaacacaccctgcatgacaaatgtcagcgtcaggagcgttgagaatccgagccataccgcttttctggcttcagctggtccgtatttttcattcagcacatctgtcgcaaaaaagattgtgccatacatcacattcccgagtgtcgctgttaagccaaacagttcaactgttttgacgacttggaggttggcgcagactgtcgcaaaaccgatccaaacaaacagtcccattttgccaaatcctttataaaataaaagaacaatgataaaatgaatgatcgcaaaaaagatccaaaacgaattattaaacaagatgaaaaagcttcctttccggggtaagattggtttgattatagcataagcccggcaactaatgaatggtaaggtgattgtaatgaagctcagaccgcatttgaaaatagaagcaaaaggaacgggatccgtctcattttttagcgaagactggctgacagcacagcaggcacgtatgctcgccagagaacttggtcgttttccatacatgaaagagctagagttcgaagacgagaaaggcggcagctggacgctgaaggaattggaaaagctgacagaggagcttgctcaagagcctgatgacattactgtttattttgacggcagtttcgataaggagagcgaactggccggtctcgggatcgtcatctattattcattgggaggaatccggcatcgcttgagaaaaaataaaagcttccggctgaaaaccaataatgaagctgaatacgcagcgctttatgaagcaataagagaagtaagagagcttggggcaagcagaaattcaattacaatcaaaggggactcgcttgttgtgctgaatcagcttgacggcagctggccttgttatgatccatctcataatgaatggcttgacaaaatagaagcactccttgaatcgctgaagcttactccaacctacgaaacaatacaacgaaaagacaatcaggaagctgacggcctcgctaaaaaaattctatcccatcaattcgtagaaagccacacgaaattagaccgtaacggagatgacgatattggataagaaaatgatctttaaagaactgacagaactgcacgatgaatattgcaaggactgttttattaagaagcagtttcgcaaagaatttggcaaaacttatgcgcattcattttgtatcaataaatgtacggttggtgaaaagctgaaacaatacggagatgtcttaaccaatcactaaaaataaaaaccgcagaagctgcggtttttattctttgaattcatccagctgatgctcgctgtcatctagcagttgctgttgctgctttacaaattcaggatcatcgagagctgccagctcttcagattgtgacagttctctagcatcctcaatggcttggtatgcagagtcaactaatgttttgctttggcctctcgtcgcagctcctgttgttttctgcgctgtttccaccgctagttccagctgccgcttatccgtaaagccagtctgatcctcattatgaaattctgaagtcaccaaaaacacctccgccattattttgcagagtttttttgaaatttatgtaccaaaatagaaaagaaaataaaaataagccgatataactattgaaccagaataaataggaccgttttactatttgaggtatcttgatagagaaggggaacgcagctatggatgataaagacttgaagttgatccttcacaaaacatttatagaaatatacagtgatttagaagaactggcggatatcgcgaaaaaaggaaaaccatcaatggaaaagtatgttgaagagattgaacagaggtgtaaacaaaacattttggcgattgaaatccagatgaaaatcaaataggagaggcgaatgcctctcctctatttgtcatctcatcatcatgtattgagtttagagttttacaacattagaagcttgaggtccacgattaccttcgacaatttcaaaagaaacttcttgtccttcttctaatgatttgtatccatctccttcgatagctgtgaagtgaacaaatacatcgtctccgccttcaacttcaatgaagccgaatcctttttcgttgttgaaccattttactttaccgttttgcatattgcttaattcctcctagtactgtagcacccatgtgctaaaaaaaattttgtcatcatttaactttgattcattgttaaatgatggttcaactatacaccatctgggagcacccgtcaagttgcgaaacggcttatttttcaaaagaagggcaagttccataaaaaatgtaaccgcttttattgatggctgaatataaataaaaagagcacacgattttcgtatgctctcaagtacgccattacgatagcactttggctttttgtttggcagtcatcatttctgattccttcaggatatcctctaaaatcacttcagaggagtttgctaaatgaaggtccttaatgtttttcttcatgcgatgcaaggtatcttcatctgcaagaagggaagtgactgattcgagaatctcttcatgacggttcacaacgatggcagctccgcggtcttcaaagaagtttgcattttctttttcctggccaggcacgggtttgtacagaatgacaggcactccaatggctgtggcttctgtcaaagtaatgccgccgggcttggtaatcatgcaatctgtgatccgaaatagctcatcaatgcgctccacatagcccagaacttttaatttgtcaccattttccgcctcaagcgcactcaaagattcttttaaagccgtatttttcccgcacacgacaaccacttgcacttggtcatccttgacaaggttttcgcacagctcttttacgttctttaatacaccgtgggcacctgccatgatcagaagcacttttttgtttggtgaaagattgtactttttatatatcgggccaaccggcatggattcttcaaattgcggcctgattggaattcctgtgatttttacattgcttggatgagtgccgatctccagcagtttttccttcacgtaatctgtcgccacataatatttatccacgttttcgtgaacccaaattttatgaagacaaaaatcagtcataacgttgaaggtaggaatgactcttccagttcggcgtctgtattccggcacgacgatcatcggaaatgtattaataataatatcgggctgatgttcatcgacaagttcgcccaatcttttattacccattttaaagtaaatattgaatttacgtttattatagattttgtcaactccgtaataaaacaaacgataaaactgtttcccgattgagaagctttttaaataaaggtattgagttacctctgaaacaatcggatttgactcttggtacaaattagaaactgttacatgctgaaagccgagccgtacacattgttcataaagtgttttggctacctgcacatgtccatttccgtaatttgcagtcaaaattaatactcttttattggtattcaagtaaattcacctcaatgtaatcaacaacaagcaagcttcatgcatcgtaaggagttattgtctatacataaacataacacaaatacataatcgaattattaatgcagtgaaaaagttaagctaattttaaatgatttggattccagtattttaaatttttgttatacgcagactgaatcagatgtattttatcatattttttgctcagcgtatcactaaaaaaagaaaaattagtcccattcataaggagtttcttggtaaacgtaataattcagccaattcataaacaataatgtggcatgcgctttccagcgattcactggctcgttgctgccttttgcaaaataatgtttaggctcctcgacagtagaaaggtttcgttccaaatctctttcatactcttgaagaagcgtatttgtatcatattcagggtgccctgtcaaaaagacttgtttttcgtcttttgacacaattaagcaaaccccggcttcctttgatgcggtaagaatgtttaaatcgggcactgcttgaagctgttccatatttatatctgtatgccgggaatgcggcacgtagtatagctcgtcaaaacctcttaccaatctttcgtgttttgaaagaacggtatgttcgaacacaccgaagatttttttcggcatttgaattttttcaacaccgtaatggtagtacaaacctgcttgagcaccccagcaaatatgcaaggttgaagtgacatttgttttgctccactccatgatttccttgagctcttcccaatatgaaacctcttcaaacgccaaatgctcgatcggcgcaccggtgataatcatgccgtcaaacctcttgtgacggatattggaaaaagtcgtgtaaaattcgtcaaggtgttctctcgcagtatttttcggcgtgtgtgtgcttgggattaaaaatgtgaaatgaacctgtaaaggcgaatttccaagcaatctgagaagctgagtctctgtttggatttttttcggcatcaaatttaatataataattttttgcggccggatatcctgatgaaatgctctgctttcatccattacaaatatctgttcactttcaagcacctgttttgccggcaggtgtgttggtatattaataggcaacgtgccacctccattatttccccgtttaattttcttcattataggaattttcacgccaattttcaatctatctatacgtgttgaggggaaacaacagaaaactctttaaataaaacgcactgacacgccttttggtttcacagtaaaatgattttcaaagatgtcagagggaattgtaatgttttatagaatgataagataaaaaatgagcgatatgaattgataatgaacggacgctcatatcgttaggtttcttatgagttcttaattgatgtttacattttgaattgcgatttaaaaaaggtaaaataatcagcaccagggacataggagggacttacatgtctatttatcatatgaaggtacgtacaatcacagggaaagacatgacacttcagcctttcgcgggaaaggtactgatgatcgtgaatacagcaagtaagtgcggttttactccccaattaaagcagctgcaggaattatatgatacatatcagcaggaggggctggagatcttagggtttccctgcaatcaattcatgaaccaagagcctgatgaagaggctgacatacaggaattttgtgaaacaaattacggtgttacatttcctatgttttcaaaagtggatgtaaacgggaaaaatgcccacccgctgtttgtgtatttgacagaacatgcgaaagggatgctgggaactaaggcgatcaagtggaatttcacgaaatttatagtggatagaaatggagaaatcgttggccgttattcaccaaatacaaatccgaaagagctggaaaacgatatcgtgaagctattagagcaataaaaagagggtgtttttatgaaggaattgaagcaggcagagcaaatcaggacatgggttcaatctatcctgactgacgaaagctctggacatgactggcatcatgtatcaagagtagcagatcttgcagcgtatattggagaaaaggaaaaagcggatttgttcattgttgaaacggcggctttggttcatgatttaattgatgtgaagctgcctgacacggtcaggctttctgtgagcgaagtatatgatcagctcgtttttttcggagtaggaaaagataatgctgacagggtgattcatattataacaaggatgtcctttcgggacagggggaaattggcgaaggagccgctctcaattgaaggaaaagccgtacaggatgctgacagacttgatgcgattggtgctgtcggcattgcgagagctttcatgtttgcgggcgcaaaagggcatggcctttatggagatgagcaaagcgcctacgctcatttttttcataagctgttgcggctgaaagatatgatgaatacagacactgcacgggaactggcagaagaaagacacaattttatgcttcagtttgtccgccaattagaaaaagaaatacccgggattgatgccaaaacgtcgtaatagaaggcttggagcgactatgatagaataagtcacagatatgctataggaggacgatcatgaagataaaatcaattgaacctacaccaagcccgaatacaatgaaagtcatcttaacggaagagcttccggcgggcaaaagcaataactataaacctgagcaagcagaaggcgcaccgcctgttatagaggaaattcttaaaatagatggagttaaaggggtatatcacgtcgcagattttcttgctgttgaacggaatgcaagatacgactggaaagacatattaccgcaagtccgcactgcatttgggatggaaagtgctgaaagcggagaagaaaatcgttctgatcaagaatcttttggagaggtaaaagtttttgtgcagatgttcagcggcattcctatgcaagttaaattaaccgatggagagcgggaagaacgcttcggcttacctgaacgctttcagcaggcgatcttaaaacttagatctgaagcttccaatgttgtgtttgagcgggcttggaaagaacaaggtgtcagattcggtgactttgatgaaatcggccatgacgtgacagaagagcttcaggcggcatacagtgatgaacggctgaaacgactgactgaagcagccgctcaaggaaagggcgaagcaaaacaaactgtacagcgcaaagcgtataaagtaacgcttgacatgctggatgatgaggactggaaaaagcgttatgcacacttggaacagatggatccgaaagaagaggatatcccggttttacagaaggcattggatgatccaaaggtgtccatcagaagacaggctgttgtgtacttagggatgattgaaacacctgatgttcttcctctattgtataaagcacttgaggacaaagctgtatcagtcagaagaacggccggagactgcctgtctgatatcggcgatcctcaagccattcccgctatgatcaagtcgttaagcgactccagcaagcttgttcgctggcgtgcggccatgttcctgtatgaagtcggggatgaaagtgcaattgaagctttgcgcgctgccgaagatgaccccgaatttgaggtcagccttcaagtcaaaatggcgcttgaacgtattgagcatggagaagaagcaaaaggttctgtttggaaacaaatgacggaaagcagaaaaaaaggcgaatagaaataaaaaaggtgcagatcatgcaccttttttatttgaattcactttttataaaaattatttcgaatattgttgaaaaatatccgaaaactatttatagtaagtaacaatattaatagttggagggttcaaatcgaaagaaagctatataaatataaaaacacgaaagaacaaaacaaggtgagggcggcctgtatttatcttatttgcaaaaacagcccataaataaactgaaaattgtcaaaataaaatccaatcaaacaattgaaagaatttaggaggatcaccatggcagaattacgcagtaatatgatcacacaaggaatcgatagagctccgcaccgcagtttgcttcgtgcagcaggagtaaaagaagaggatttcggcaagccgtttattgcggtgtgtaattcatacattgatatcgttcccggtcatgttcacttgcaggagtttgggaaaatcgtaaaagaagcaatcagagaagcagggggcgttccgtttgaatttaataccattggggtagatgatggtatcgcaatggggcatatcggtatgagatattcgctgccaagccgtgaaattatcgcagactctgtggaaacggttgtatccgcacattggtttgacggaatggtctgtattccgaactgcgacaaaatcacaccgggaatgcttatggcggcaatgcgcatcaacattccgacgatttttgtcagcggcggaccgatggcggcaggaagaacaagtgacgggcgaaaaatctccctttcctcagtattcgaaggggtaggcgcctaccaagcagggaaaatcaacgaaaacgagcttcaagaactagagcagttcggatgcccaacgtgcgggtcttgctcaggcatgtttacggcgaactcaatgaactgtctgtcagaagcacttggtcttgccttgccgggtaatggaaccattctggcgacatctccggaacgcaaagagtttgtgagaaaatcggctgcgcaattaatggaaacgattcgcaaagatatcaaaccgcgtgatatcgttacagtaaaagcgattgataacgcgtttgcactcgatatggcgctcggaggttctacaaataccgttcttcatacgcttgcccttgcaaacgaagccggcgttgaatactctttagaacgcattaacgaagtcgctgagcgcgtgccgcacttggccaagctggcgcctgcatcggatgtgtttattgaagatcttcatgaagcgggcggcgtgtcagcggctctgaatgagctttccaagaaagaaggagcgcttcatttagatgcgctgactgttacaggaaaaactcttggagaaaccattgccggacatgaagtaaaggattatgacgtcattcatccgctggatcaaccattcactgaaaagggtggccttgctgttttattcggtaatctagctccggacggcgctatcattaaaacaggcggcgtacagaatgggattacaagacacgaagggccggctgtcgtattcgattctcaggacgaggcgcttgacggcattatcaaccgaaaagtaaaagaaggcgacgttgttatcatcagatatgaagggccaaaaggcggacctggcatgccggaaatgctggcgccaacatcccaaatcgttggaatgggactcggaccaaaagtggcattgattacggacggacgtttttccggagcctcccgtggcctctcaatcggccacgtatcacctgaggcagctgagggcgggccgcttgcctttgttgaaaacggagaccatattatcgttgatattgaaaaacgtatcttggatgtacaagtgccagaagaagagtgggaaaaacgaaaagcgaactggaaaggttttgaaccgaaagtgaaaaccggctacctggcacgttattctaaacttgtgacgagtgccaacaccggcggtattatgaaaatctagacagctggggacactttcttttattttaaggcgtgaacatttgaaatccggccctctctatagtatcctttacttcagatgaaggatactagagggggctttttttatgtcaatggcttatgaagaatacatgcgccagcttgtcgtaccgatgcgccgcgagctgactggagcaggttttgaagagttaacaacagcggaagaagtagaaaactttatggaaaaggcagagggcacaactcttgtagtcgttaactctgtatgcggctgtgcggcaggccttgcgcgtcctgcggctacacaggcagtcctccagaatgacaaaacacctgacaatacggtgactgtttttgcgggccaagataaagaagctactgcgaaaatgcgtgagtattttactggccaggagccttcttcaccatcaatggctcttttgaaaggcaaagaagtcgtacattttattccgcgtcatgaaattgaaggacacgatatggaagaaattatgagaaatctgactgctgccttcgatgcgcactgctaaatgcccgttctccgggcattttctttttgggagtacagaagatgataacaacaagctatagaccgtctgaacacaccataaaaactgcaaagcagctttctaaagagctaaatatgccatactgcggccggaataaacaaacggttgaacacctgttgaagtcagctgaacgtgatttgctagtggtcggcaaagagcggtttgagctgtatacgaaacaaggtgccaaattcttttttcatccgaatacagcgatgttcagagccaaacgcttcttacagggagagcaagagcctatgcttcgggctgccggcttatctgaaggggatgcgtttttagattgcacactcgggctggggtcagatgccattatcgcaagtatggcagtaggcgaaacgggttctgttgttgggattgaaaaaaaccatcttgtgtctgttttagtgaggatggggctgcattcatgggaaacgggtatagaagagcttcaagctgcgatgagaagaatccaggtgaagaatggtgattgcttagaatacatcaagcagcttcctgacaactctgttgatgtggtttatttcgatccaatgtttcatgaacctgtagagacctctgacggcatcgcgcctttacgtgatttggcagaggattccgttttgcacgaaggatgtatcaatgaagcggtacgagtcgccagaaaaagcgttgtgctaaaagaccactggaaaagcccgcgatttgaacagtttggttttaacgtcatgaaaagaaaaacagcactgttccattatggcgtcattcaaacaagcccgtgattcatatcacgggctttctgttaatcggtgacctccatgacgacaaagtataacaatgttaagagtgaaactgtggcaaacagagcgtcaatcatgcggaaagcctcctttcatggaatattgtaagcgtttttacacaaagtgcatagcaacgaatctcctaatttgcatatcagtttcatatagtacatgacttgcatgttttggatgtgctaaaataagagaaacatgacaataaaatagagaggaataagcagtcatgaaattgtggatgagaaagacccttgtggttttatttaccattgtaacgttcgggctcgtatctcctccggctgcccttatggcggacaagccttccggacagccgagcagtcttgagcagaatgattacaccgctttttatgatgagcatgacctgtacgatgatgagtcggatgacaggcgagatcctgaactgctttttcaatcgtacaaggaacagctccttgacagcgctgaggatcagtcctttttaaaattcggcagcagaatcgctcctgtcattgaggatgactatcggaaagagatcctgccaaaaatcgaaaaagtgattagtgattatttagcgacattgcaagatgatgaggcgtaccaagatgttgtgatctcaagcatgccttcagcgggcaaaacggaaaaaattttcaacgtttacaatcggacaactggagaagatcttctcagattccatgtgcgaagagaccacccgcctcatgacggctactggtttaattttcattatcatacagcagaagatggatttcaatcacatcatgagcttgggagtatttactgggaccgcaacacgcctcccaactggatgagtgcctaaaggagatgccattagacatgaaaaagtacacaatgaatgaaatggtcgatataacaaaggatatgctgaacaaacggggcgttatgatagaagatattgcacggattgttcaaaaacttcaggaaaaatacaatccaaatctgccgctcagtgtttgcatggagaatgtagaaaaagtcctgaacaaacgtgaaattattcatgctgttttgacaggccttgcactcgatcagcttgcagaacagaagtttctccccgaaccgctgcagcaccttgttgaaacggatgaaccgctttacggcatagatgaaattatcccgctttccatcgttaatgtgtacgggtcgatcggtttgaccaatttcggttatttggataaagagaagattggaattattaaggaacttgatgaaagtccagacggtattcacacctttttggatgatattgtggcagctcttgctgcagcagcggcgagcagaattgcacatacgcatcaggatctgcaagatgaagaaaaagaacaggatgaaaagcctgtcgtcagctgactataaaaaaatcatttctgggttcagaaatgattttttattgtgttacactactagaagactacttttaaaggatgaaaaaaatgaaacagtttaaggatttatgcagacatgttttagagcaaaaaggggcggtaagcgtatgatttcattcatttttgcgatggatgccaacaggcttatcggcaaagacaatgatttgccgtggcatttgcccaatgatcttgcatactttaagaaagtaacatcgggccattcaatcattatgggccgaaaaacatttgaatcgatcggacgtccgcttccaaatcggaaaaatattgtcgttacctcagcgccgtcttcagaatttccgggatgcacggttgtcggttcattaaaggatgtactggacatttgttcaggccctgaagaatgctttgtgatcggaggggctcagctctatacggaccttttcccttatgcggacagactgtatatgacgaaaattcatcacgagtttgagggtgaccgtcacttccctaaatttgatgaatccaattggaagctggtttcttctgagcaggggatcaaagacgaaaaaaacccgtatgattacgaatttctaatgtatgaaaaaaagaattcttctaaagcgggaggattttaattggttcgctacagccttctggtggtttatattgtgtatatgctgttaaaaaatatgaaacaattatttaatcaaacaatgctcgatccccgtctatcatacaaaaaacagatgactcttgtgtacgaacagccaaaggcgtttttggaaggctgtatcggcatatccggttcagttgtgacgatccatcagccagagccaataccacacggtcctgttttgtatgtgcatccccgtttgcatttggctgaactggccttaattgctggatatattgaggaaccggccggctttatcgccaacccaaaagtgttccgcttgccttttatcgggcaatggctggatcggatggatgtgatttcagacggtgattcagaaaaggtatatgaagatgtgacaaaacagctggaaaagggacaaagcctgattctttcactagatggttctattgatcctgtagaacttgcggcccgctatcatcttccgttggtgatggtggaaacgaaaggaacagataacatgcaaaagggctcgttttttaaacgcttaaaaccggcagacattgaattgtccttttcaaaagcttatatacctgccaatgaaaaacaattacgtgcataaaaaaagcgcagtcgttaagactgcgcttttctgttactgttacgaaaggaacggcacttttacacaatagaagagcacgcagaaaaacatggcggcgctcccgcccaatacaaagctgtgccaaatggcgtgatggaaggggatctttttccaaatgtaaaagatggtcccgacagagtataaaatgccgccgagaaaaaggaggctgaatcccgctccgctcagtgaaacatataaaggtttaactgcaataatcatcagccaccccatgactaaatacacgaaggttgacaataggataaaccgtttcacaaagaaaattttaaaaacgattccgcctagggcaagtgaccatacgataaccaacagggtaaagccgagtgtgcctttcagcggcccaagcaaaaaaggcgtgtaggttccggcgatgagtacgtaaatcgcgctatgatcaataatctccaaaatgtccttcgtttttttatgtgtgatgctgtgaagcagggtggagctcaaatataacagcagcatagagacaccgaatattgtaaagctgataatgtcccatgcagacccgtaattagccgcaaatatgattagaaacactaatgctgggatggataagaggacaccgatgccgtgtgtaatcgcattggcgatctcttctttgattgtaaacaagtacattctcctttcgatcgctagatcatttgattttttaacgtctctataaagctcaagccctcaaaggtaatttttgtgcctgcgcgtccgcggcttttggtgacataatcttttttctccaaatagtcgagacggcttctgacctgctgaggagttaacgaggtttgggtatttttgctgtgttcagaaatgatccgtctgctggcaggttctcctttttcgttcaatacttttattgtttccaaaataaacaaaaactcagctttttccattaaagtcagcagcttcgcttttttcttcgacgtttttccgtctatcgcgcctctaatatacggcggcaggtcatatggctgaatcgttcccccgcttgatactgccgccatataatctgcagcgttttttaattccctgacattgccttcaaatgcatgcttctcaagcacgggaaaaacggagggatcgattaagaattgctgaccggaatttgagagaaaatgctgtgtcaaaagcggaatatcgctttttcgttccgataattcgggcagtgtgagcgttaaaatgttcagtctgtagaataagtcttgcctgaatgtatgttccacggatcggtctgcagaagcacagatcattcgcggtttctccgtgtctgaatcaagcgcttttaacagctgagcttgtacagaagcaggcatgcgccatacatcatcaagaaaaagggttcctcgtaccgctttttgaaaaacacctgtgtttccgttagggccaaaaagctcatgaaaaagggtttcttccgaatgggtgctgcaattgacgctcataaacggttcattgcttctcgaagattccaagtgtatggcatgtgcgaagtgatttttgcctgttccgatttttcctgttattaagacaggaagctccgataacgagaactgcttggcgattcgcttcgcttccagaaaagtttgatgttctccgattagatgttgaaatgtattgagttttggtgcactattcatcaattggctccttttggttctaattggtttcattatatcatgccttttggttgaaaacaccctttattttacgatcatcttttttcttggctctgcaggataatggttgaacagaagttaccacaagatgtggcggacatagtctgtatttttttaattattaaataaaaataattgtcttattttttgaatattcatgttataatggcatattaaatagggatttaaaacaagaaaggaatctgtacatgaaaccgttgcttaaagaaaactctctcatccaagtgaaagacattttgaaggctcaccaaaacgtaaaggacgttgtcattcacacacctttgcagaggaatgacagactttctgagagatatgaatgcaatatctatttaaaacgcgaagacttgcaagttgtcagatcttttaagctcagaggggcttatcataaaatgaaacagctttccagcgagcagacagagaacggagttgtgtgtgcaagtgccggaaaccacgctcaaggtgtggcattttcgtgtaaacatcttggcattcacggaaaaatttttatgccgtctactacaccgagacaaaaagtatctcaagttgaactattcggaaaaggatttatcgacattattttgacaggcgatacgtttgacgacgcgtataaaagcgctgctgaatgctgtgaggcggaatctcggacgtttatccatccgttcgatgatccggatgtgatggccggacagggaacgctcgcagtcgagattttaaacgacattgatacagaaccgcattttctttttgcaagtgtcggtggcggcggccttctctctggggtaggtacatatttgaaaaacgtgtctcctgatacaaaggtaattgctgttgagccggcgggagcggcatcctactttgaatcaaacaaagctgggcatgtcgtcacacttgataaaattgataagtttgtagatggtgcggctgttaaaaaaattggcgaagaaaccttccggacgctggaaactgtcgttgatgacattctccttgtgcctgaaggaaaagtatgtacatccattcttgaattatataacgaatgtgcggttgttgctgaaccggctggagctctttctgtcgcagcgcttgatttgtacaaggatgaaattaaagggaaaaacgtggtgtgtgtggtaagcgggggcaataacgatatcggaagaatgcaggaaatgaaggagcgttccttgatttttgaaggtcttcagcattattttatcgtcaactttccgcaaagagcgggggcgctccgcgaatttcttgacgaagtcctcggaccgaatgatgacattacaaggtttgaatatacgaagaaaaataataaaagcaatggacctgctcttgtcggcatcgagctgcagaacaaagccgattatgggccgctgattgaacggatgaacaaaaaaccgtttcattatgtagaggtgaacaaggatgaggacttgttccatttgctaatctaatttttttacacaaccgcgcaaaatgacagacagcccggctggcatcatatataatagaagaaaaacaaaaaagaggattgatagcttgttactcaaaagcctagagttcaaacgcgatgacgggattcaggtgaaagtgacagaaatacctgtattaaaggaagatgagcactatttctttatgttacatcaccatttgcaattctacttaaaagaagtgttttcatcaaacagcagggcaaaagtgtattctttccgacattatatgaagcgccggatgaagtgggcagattatcaggctgtatttcatcaagaggtgttaaagcacaacgcgtaacatgccgttttttacctgcatgccctcctttgtaatcgttaatggggaggcatgcaggattttttttgctcagtatcgaatacaaacatgggacagtaaggacggttttagaaagcgtttttatgctggctggaaaggatggatgtcatgaaggttatcaaggggttaacggctgggctgatttttctgtttttgtgtgcatgcggaggacagcagattaaaaatccgctcaattacgaggtggagccttttacatttcaaaaccaagacggcaagaacgtttctttagagagtttaaaaggagaagtatggctggcggattttatttttaccaattgtgaaactatatgtccgccaatgaccgctcatatgaccgatctgcaaaaaaaactgaaagccgaaaatatagatgtccgcatcatatcatttagtgttgatccagaaaacgataagccgaaacagctgaagaaatttgccgcaaattatccattatcttttgataactgggattttctcacgggatacagccagagtgagattgaggagttcgcacttaagagctttaaagcgatcgtaaagaagccggagggagaggaccaagtgattcatcaatcttctttttatttggtaggtccggacggtaaggtgctgaaagattacaacggagtggaaaatacaccgtacgatgatattatcgccgatgtgaagacagccagtacactcaagtaagctaggagactaggcatttgcaaatcttctaaaacatgatacactttccactagtagaatgggaaggagcaacaagattgaagctgcgcattttttcaatcatggccagtttgattttgcttcttactgcgtgtacgagcatacgtacatcatctgagggaaaacaaaaagcccatgaaacgaaaacaaaagaacacattgtcatagcggctgtcggagattcgctgacagaaggagtcggagatcccgacggaaagggatatgtcggcaaggtggcggattctatccggtcagataaacaagtcaaaacggtcgacgtgaaaaattatgccgtaaaagggaaccgttcggatgatttattagaaaaactaaaagataaaaaggttcaaaaaggcataaaggacgcagattatgtcttttttacaattggcggtaatgatttgatgaaaatccttcgccaaaactttctgcaattaaccgttgaaccgtttcaggaagcggaaaaaccgtacgaaaagcgctttgaaaaaatcatttctgaaattcgcgagctgaatgatcacgctgagctgatttatgtcagcatgtacaatccgtttacgtttacattatcagaactaaatgaaataaatggtgtcgtcacggattggaaccatattgctgaaaaagagctgaaaaaagataaacatgcaaaaatcgttcatatcgaagatttgttcaatcaaaaaagtgacagcagccgaatttctgaggaagatgattttcatcctaatggtacgggttattctcttatcgcaaagcgcgtctatcaagccattaaaaaagaaggattaccgaaagagtagggtgacagcatgaataagtggaagcgactgttttttatattgcttgcaatcaattttatcctcgccgccgggtttgtggcacttgttttgctcccgggggaacaggctcaggtgaaggattcatctgagagcgagtatggatttcaagtgacaagcacaaaagaatcattagctgcgtttgttaactcatatttaaacgacaaagcatcaaacaagcttgattataaagtagagattgatgatgatgttcatgtcgcagggaaaatcaaggcattttccacgtctattgatgcgtttatcgcttttgagccgactgtgaaaaaaaacggtgatgtagagctgaatgtcacgaaattttcgttagggaaattgagtataccaattagctttgtgttaaattatatggacagcttttatgaattgccgtcatttgtccatgttcaccccggagaaaaaagcattgaagtgcgtttgtcagaaatgcctttaacgaatggaatgtatgtcaaagcggataagataaatttagaaaaagatgaaattgagttttcctattaccatcctaaacaatagaggtgactgaaaatgaaacggatttaccagtatttcagtttattatcctttacattttccctgtacttcggctggcttgcttatcatcatctggctgctgaagatatggatcaaatgtatttgaatgtttcctattgtgccttgttcctgagtgtgatggtgtttacattcggtatgcgagaccgaaaaaaacccgataagtcatgaaaaaagagacatgaaacaacgtctcttttttcgtgcggtccgaagaaaatttgagaacacaaggagaaaagatgaaagcatacgattttacacaggggaacgtgctgaaacagcttgtactgttttcaatgcctattatgcttggaaacgcattgcaggtttcctttcaatttatagacagcttgtggatcggcaatttactgggggcaaaggcccttggggcagccgcggtatcaagcacgattgttttgaccgtgctgtcttttattttgggccttaacaatgcgacgttaaccattttatctcagcaaaaaggaaaagatgatgtaaaaggaatggcgtcgtatattaacgcttttgttgttttattaacaggcctaagcatcggattcggcgcggccggtttttttctctcagagcttttgctgcgtcttctaaaaacgccggagtcaatgataccgcttgctgagacgtatttacagattcaatttatcggcattttatttttgtttggttataactttatcagtactgtgcttcgtgcgctgggcgacagcaagacacctctccggtttattgcgtttgctgttgtactgaatacagtgcttgcgccgctctttatttctgtgttccgcatgggaatagcgggagcggcttattcaacgattttgtcacagggcattgcgtttttgtatgggttgttttatgtggtcaaacacaagcttgtgccattctcaattccgagaatgcccaagtgggaagagtccgcgctgattttcaaactcgggattccggcaggtctgcagatgatggtgattacaggcggtatgatggcgattatgagtgttgttaactcatacggggatcacgtggtatcaggctttggcgcggtgcagcggcttgatagtatcatcacgcttccagcaatggctgccggtacggccgtcaacagtatggcagggcaaaatattggaatcggaaacgaaaaaagagtgggaacaattgcaaggctaggtgtggtggctgttatttcctgcatgctggtgattgcggttatgatttgggtatttggtaaatatctcataaggttatttatcagtgagcctgatgcggtcgcatttggtgaacaatatttgaagtggatcgcgtttttctacccttttattgggattaattttgtgctgaacggaatcgtcagggccgcgggagcgatgctgcaggttctggtattaaatttgatctcgttttgggtgttgagatatcctttcacagctctattttcagcttggcttggacaaaaaggaatcgggcttggaatcggaatgagttttttatttagcagctgcgcggcatttttgtattatagatatggccgctggaaagcaatgaagctgtttactgaaaaataagtgaagcactgcgaaaagcacatacctatatatcggtatgtgctttttttcaccgttttttatcaagtttgctgaagagctcgattaacgtggcaagttcagcatcagtgtagcagtcaaagcgtttaaagaaatattccgtttttttctcgttaaagtgctgaaggactttttcgcccgcttcagtgatatgaatgcggatgatgcgtctgtcttccttcgatctgattctcgtaatccattccttttctaccagcgcatcggtcacagccgtaatgtggcttgccgatacctctaaaataggcgcaaattcagtgacttttttaggcccttgttcactgaggatccgaagaatggtgaattcattccgcgacagctctttatctaaaatttcattgatttcattgcgtatttgtttaaagactttacggagtaaagtttccatatcgtacatcatctgtgttcttactttcaaatttgtgaacctccattacataagcatattgcttaaaacctatagattttattgaaaagcagaatcattttcattctatttttacatgctataatataataataccacgtattaacaaaggaggcaccagtatgtctgaaaaaaaagaaatcgccacatttgcaggaggctgtttttggtgtatggttaaaccttttgacgaacagccgggaattgaaaaagtggtgtccgggtatacaggcggccatactgaaaaccctacgtatgaagaggtgtgcagtgaaacgacgggacatcgtgaagccgttcaaatcacgtttaatcctgatgtattcccttatgaaaaactgcttgaattattttggcagcaaatcgatccgacagatgccggggggcaatttgctgatcgcggcagttcctatcgcgcagccattttttatcataatgataaacaaaaggagcttgcggaagcttccaagcaacgtctggctgaaagcggcatctttaaagatccgattgtaacggacattttaaaagctgaacctttctatgaagcggaaggctaccatcagcatttttataaaaagaatccagcacattatcagcgctaccggacaggttccggacgtgcggggtttatcagtgagcattggggggctaaataaatggcgtacaataaagaagaaaaaataaagtcattaaatcgcatgcaatatgaagtaacgcaaaataacggcacggagccgccatttcaaaatgaatattgggatcataaggaagaagggttgtatgtagacattgtgtcaggcaagccattgtttacatccaaggataaatttgattcccactgcggctggccaagctttacaaagccgattgaagaggaagaagtggaagaaaaactggacacgagccacggcatgattcgcacagaagtaagaagccgaactgctgattctcatcttggccacgtatttaatgacggacctggtccaaacggacttcgttattgcataaattcagcagcgctgcggtttgttccgaagcataagctaaaagaagaaggatacgaaagctatctgcatctctttaataaataaagtgttaaaaacaggcctgcctaatggatagacaggcttgtttttatgcctttttctcttgatgcaattcttcaataatctgagcaattctttctttcgtaatgagcggggcttgatctgattgatacccaggcagattgactttgcgaaagtcaggatgtttttccggctctggaaggatcgcataaaggttgccccattcatacagtgattcaatttcatgtggagatgttaattcttcgtgaagcttttcacctggacgcttgcccacttctactgcagccggccgcgggagcccgtgctgcgatgcatattcttcaaacccatgaatcagttcttcaagtttcagtgattccattttgaaaataaaggtttctccgccttttgtaatagcagccgattgtaatgtcaatgtagctgcatcgtctattgacatgaaaaatctggtcatgtttttgtctgtgatggtcagaggttcaccctccatcatctgttcaaataatatggggatgaccgaacctctggaaccgagaacatttccaaagcggaccgaacaaaacaaggttcctttgttttggacgtggcggtttgcttgatgaaacagcttttcagataacagcttggtggcacccattgtgttcacaggagatactgctttatctgtactgatattaatgacatgctgcactcggtgtgtaagggcagcttccaccacattttgtccgccgatgagattggtctggatcgcttcaaatggatggtcctcacatgtcggaacctgtttcagcgcagccgcgtgaaagacgatatcgacgtctttcatcacctgattcacccttctgtgatcgcgtacatctccgagtacaaataatagccgcttatcctccgcatacttttggctcatgacatactgtttactgtcgtctttgctgaatacaatcacctgtttaggtgtaagcagcaaaaggcgtttgacaatttgactcccgattgaacccgttccgccagtgactaaaactgttttgttatggaaaaatggttttagttctgctgtttgctgtttaggcatggcttatcctccaactctcgtttctctaccatgcatcatatgttcaactttgtaatcgaattaatgaaagcaaccaataaaacaaaatttaggggaatgatcatgtcacaaagtgttcttttttaatagaaaatggaaaaacggacgtaactagggaactacaaaactaaataaacaatgtactaaatattcaacatatttttatttcgctccgcaaaagcaaatctggcaaagtcatctcacttacctctttggggaataagttgtttatgagtcagaaaccctataaaaaaaggttcattttcctcacggtaatcacctgtatatattttacaataatagtgatagtgataaaagaggaggataccaaatgaaggtttcaaaaacaatgctgctaagcactgccgcgggtttattgcttagcctgacagcaacctcggtgtcggctcattatgtgaatgaggaacatcatttcaaagtgactgcacacacggagacagatccggtcgcatctggcgatgacgcagcagatgacccggccatttgggttcatgaaaaacacccggaaaaaagcaagttgattacaacaaataagaagtcagggctcgttgtgtatgatttagacggaaaacagcttcattcttatgagtttggcaagctcaataatgtcgatctgcgctatgattttccattgaacggcgaaaaaattgatattgctgctgcatccaaccggtccgaaggaaaaaatacaattgaagtatatgcaatagacggggataaaggaaaattgaaaagcattacagatccgaaacatcctatttccaccaatatttctgaggtttatggattcggcctgtatcacagccagaaaacaggagcattttacgcattagtgacaggcaaacaaggggaatttgagcagtatgaaattgttgatggtggaaagggttatgtaacagggaaaaaggtgcgtgaatttaagttgaattctcagaccgaaggccttgttgcggatgatgagtatgggaacctatacatagcagaggaagatgaggccatctggaaatttaacgctgagcccggcggaggatcaaaggggcaggttgttgaccgtgcgacaggagatcatttgacagctgatattgaaggactgacaatctattatgcaccaaatggcaaaggatatctcatggcttcaagtcaaggaaataacagctatgcaatgtatgaacggcagggggaaaatcgctatgtagccaactttgagattacagatggcgagaaaatagacggtactagtgacacggatggtattgatgttctcggtttcggacttggcccaaaatatccatacgggatttttgtggcgcaggacggcgaaaatatcgataacggacaagccgtcaatcaaaatttcaaaattgtatcgtgggaacaaattgcacagcatctcggcgaaatgcctgatcttcataaacaggtaaatccgaggaagctgaaagaccgttctgacggctagaatagaaagcagcttgtgcagctgcttttttctatgaataaaaaaatcgttcatagcaatgaacgatttttcaagaaagcgccagatgaatcgcttttagttttgcaggaagctcatcaaacgtaaatgcgggtacggtctctttataattggctgctgcagctttttgccgttcttcaggatggttgatatagaaagcggctttttccttaaagtcgttcatgccgtgataagaaataaaggatgaaaaaggatgcgccgcgggtaaatctgttaattgaaatgcttcgcatgcagcgatatcaaacgttcggttattaaaactggcatttttgatgcgcatagtattttggttgaaagcaaaatgatggggacgatgcgcattaattacgatgtctgccccattataataatgaacggcctgttcgggtggaacccatgtgctgacgacatcaatatgcggctgtttgagcacttttttaggcagatattttctccattccttgccgattacccggaccgtgaatggcagatggaccgcttctttcataagctgaacccgattagggtaagggtagccgatgattaacagatttgaatgataggattgttcggtgcccatttttttaaacagccgatgattaactggtatcggaacataatagacgtgctggtagccgagcccttgataatagagaacggcattttgttcaatcgttaatatggcgtcagcgagcttgattacctgtaggctgatatccatataaaatgggtcttcggtcagccaaacatatacggggatacccttaccctttaaccaggtcagccagtcgtgaggaacgcggtctccaaccatcaagagtgcgaagtccggctgaaacgtttcgatcttcaccaaagtttctgcttcaagtgtatctgcagacatatactctgtatgagtgttccgaaaacattcttcagcccagcgatcaaaataacaatatattcctccgtatcccgactggatatacaacactttcatcggatgttatgaaaagaacgtaacgctttctactttgtctacatcaattaatgttgtagcttggcctgctggagtgacggagctttcctgtgttacaaatacgatcccgtgaacctgatcgaaagcaacgaagacaaccggcccgatcatgtctcccgaatcggttacaatgctgattgtcgtgcctggcgtaactctggcaaaaatccatcttgccggaagggaagggtctaaaagagattctgccgtaaccatctcactttcatctactctttgatcgatggcagcttcaagcaagtctttaaggttactatccatgttttctcctccttctgttgcagttggaaataaagggcttaaaacggctttaattaaatccttttttaactgtgcattttcagagctcattacacacacctcctattcgatagtgaactcacgttaatcatattcttccggctgttatttggtatgagtcgaacgccgtacctgatctaattttcatctatttaaggaaaatgctgattttttaatggagtggacatagcctataccataaatcggagtcgcacatattgtgaaacagagataaggataagggagagggatgatttggatttagagaaacaagtggatcgagaagaaaatcaagatgaactgcattttattttgcttttgctgattctgctgatacgtcaatcgtcttctgaaggaaatccatctgacctcagacgccagcttgtttttgcaaaagagctgggcgtaccggtttcaaaagtcaatttgattaacggagatacacttcaaaatgtcatcgtaaaagaagttctgactgatttggttattttccaaaacccgttaaataacacgagatctcatgtttcactctcaagtgttgtaagctggggtgctttttaaatgatgacagaggctccgcttgctgcggagccgtttttatgtttgacggagggaggcggtatagatgggagagaaagtgtctattattttaacaagttacaacaaacccgattatttgcaaaaagcgatcgaaagcgtgatacagcaaacgcatgatctttgggagctttttatcatggatgatcattcgaatgcagaaacaactgcggtgattcacaagtatctccacgaccggcgcattcaatatcataacagtttcgtgcatcctgcagatcgattaaaaacagctcgttatgccacattaattaacagtgcgctcccatttgcagacggcgattacatttcctatcttactgacgacactgtttatcatcctgagcggctgagccgtatgatgcaagagttttcacataagcctgaagcgcaggcggtctattcaaaacaaaaagttgtacatgtaaacgaaaggggagaggaaatctcacatttctacagaaatgccaatgcagtgcttgatcaggccgcttttcaagttgatcattgctccgttatgcatcgccgttcgttacttaatctcatccaccataaatttggaggctactgggatgatgatatgaagcattggaatcatggcgacgcaattttttgggcgagactcaacaactttaccccatttctgccgataaatgaagtattagacacaacctataaaaccccagattcatttcaaaatgcatatcggtttctgcccgccgatttgattgacggctcttttgtaaaaggttcagatcaaaatgtgtatttttttgatcagggtgtaaggcatcctgttggagaaaagtggggttttttgtatctaaatcggactgtcgctgttccagacccatatttattccaatataggattggcaaaattttaaacattccgaattatattttagtaaaggaagctgaccatcctgcaatattttatatcgaagctggaaaaaaaaggcgaatcgtggaccagtatgcgtttcaattttatcaatttcaaagaaaagacatagtgacaattggaaaagaagagatggagacgcttccggaagggccgccgattacgtggaaacgatctgaattgatcaaaaatccgcctggccgacgtctgtttttcatcgaacgcgagccgtttttgtttctaaacggcgtctttcacccgattagtgaacaagtaacaaggaagttttttttacatcagaagccaatctccgcttctttccgaaatattcagcaatttccaattggaaagccgttttatccggtgtacgatgagattataaagaaattgaatattgcaacagagtaaaggtataggtcataaaaaggagacgttcatgacaggacattattcaaaaacggaacatcaatatatattgttaacgtctgaatcggcatcgtttgatcattacagcgtatacagagatccgcagcttccgcaaattttttctcataactttgttcagctccatgatacgtttccattggagcggttacttaactttttaccctccgtaccaaagctgcttgatgcgaattatctccatttaaaagcgtcgccgcagcatgtttttccgctcggtttgaagcagtcgcttgtaaaaagcggttttgtcgtcgaggatgagctactatatgacatgaagcttagtgactggaaggggcagatgggacatcctttaaccgcatgggggacggcaaaaagtctttgcgacggatcttctattatgaaaatttacgattccatttatattggagaagcaatcgctgaacaaaaattaaaaagaaaatatcctttctatgaagcaggtataatcattcttgttgtttgttacagcgaccaggcacagaaagttcccattgggtgcggcgagctgtttatcgatcatcaagagaaaacggctaaaatcgaagaagtggcaattttagatcagtttcaaaggaagggctacggcagtatcttagtgaaagaaatgctgtccatcgccaaatcactaggaatggaagcagcctacttagtggctgcaagcactgacggtgcaactcagttttacgaaaagctgacgtttaaaaaatatgagcgggtgcatactgtatttcattatttccttacatgaaataggcgtttgcacaaaccatttgggacttggcccgcataaaatgccgtatatcgtgataagaaaggatgaaaacagcatgtatggatactctgggtacggttacggatttggctgcgggacaaatacatttgtgttaattgttgtcttgttcattttattaattattgttggagccgcttttatttgctagatgctgaaatttcaaaagagccttccctattaggaaggctctttttatgtgaaaaagtttttgcggggaacgtcatgccgccatttggacactcatacaatatggtaaaaggggttttgaggtgggagcatgagcagttatttgattaagccagagcttagctcggcctatccggttgtcagttatgcgaagggttcatatgtttatgatcagaccggaaaaaaatatctcgacggctcgtcaggtgcggtgacatgtaatatcggccacggagttcgtgatgtgactgagaagctgaaagaacagcttgatcaggtgtcttttgcttaccgctcacagtttacgagtgagcccgccgagcaattagccgctctcttggcacaggagctgcccggagatgtgaattggtctttttttgtcaacagcgggtcagaagcgatagaaacagctatgaaaatcgccattcagtattggcaggaaaaaaagcaaacacaaaaatccatctttttgtctcgatggagcagttaccacggaataactttgggagcgctttcattgtctggtttttatgaaaggagataccggttcacccatctcattgagcggtatccagctatctcagctccacatatttatcggctgaattatgagacggaagaagactttgttcagactgcagctgatgaactggacactatgatcaaaagaatcggaagccaattcatcgccggctttgtggctgagcctattattggtgctgcaggagcagcgattactccgcctccgggatattatgagagattaagtgaggtatgccgcacacacgatgtgctttttattgcagatgaagtgatgacggggcttgggagaacaggaaggatgctcgcgacagagcattgggacaccgtacctgatattgctgtactggggaagggactcggtgcggggtatgcacctattgccgctgccgtcgtatctgattctattattgaaacgataaaacaagggtcaggtgtgattatgagcggtcacacatatagtgcacatccctattcagccaaagctgctcttgaagttttgcgatatgtgttaaagcacggcttgatcaaacaatcagaaaaaaagggcgctgtgctgaagaaaaagcttgatgaggcggcatctcaaagcggcattataggtgatgtgcgcggaaaaggactgctattaggcattgaatttgtggcagaccaaaaaacgaagaaagtgtttccgccagagcaggcggtaacccagcttattgtcagcgaggcgaaaaaacgcgggctgattgtttatccttccaaagctggaatagacagtggagaaggagatgctgtcattattgctcctccttttaccatttcagacgttgaaatggaagagcttatctctattttttcagaaacagttgcagcggtcgaaaaaaacttaaaaaaggattgacattaaatggcgccatttcaaaaagcaatcagcattgacacagcaattgcagatgttcgggatggatcggttctgatgtttggcggttttgggggagtcgggtcgcctccttcattgattgaagcgatattggacagcggtataacggatttaactgtgatttgcaatgacgccggtttcccggatatagggatcggcccgcttattgttaatcaacgggtcaaaaccctgatcgcctcgcatataggttccaatcctgtagccggaaaacagatgacagaggggacgttagaggttcaattttcacctcagggaacgcttgcggaacggattcgcgctggcggagcgggacttggcggtattttaaccgatgtgggcattgataatccaatggtttgcgaaaaaaaggacatcgtaacagtggcgggaaaacgatacttgattgaagaggcgctgacggctgattttgcttttatcaatgcttacattgcagatgaattcggcaatctaacgtatgacaaaaccgcgcgcaatatgaatccgcttatggcaatggccgccaggagaacctttgccgaagctgagcgtatcgttccgatgggggagatttctgaagaaatgattgtcacaccgggggtttttgttaagggggttgtacgaagcgagggagtgaagtggaaatgggcttgggagtagcagaaagagaacagattgcaaaacgcgctgctactgaaattaagcagggcatgattgtgaatctcggtatcggtatcccatccttggtaccgaactttttgaagcctgacatgcaggtcatgtttcaagcggaaaacggtgtccttggcattggagaaagtcccgaaaagggagaagaggatgcgcatttatgcaacgccgcgggatatcctgtccgcgctgtaaaaggggcgtcttattttgatacaaccatgtcttttgcaatgatcagaaaaggcaaaattgacattacgattttaggcgccctgcaggtgagccaatcaggagatttggcaaattggcttgttccgggaaaaaaggtgcctggtatgggcggggcgatggagcttgcccaaaaagcgaaaaaagtggttgtcgtcatgagtcatacagatcaaaagggaaggcctaaattaacagaaagatgtacgctgccattaactgctgcaggctgtgtagatttgattattaccgaaaaagcggttcttgaggtcgatagccatcacttcattttaaaagagctgatgaatggctcgacaatcgatgaggtgacgaggctgacagaagctgaaatcaaaatagatatgcctttttcttaagagggggaatgaggatgcaagacattgaaagaaaagtaatcgagtggcttgatcagcattcggccaaagccattcgtcttctcaaaaggctcattggggaaaaaagcacattggggtcagagtttaacgcccaagctgttgtgcttgaaaagctgcggcaatttcatatggacattgatgtatgggagccaagcataaagcaattaaaacagcatccctactttaaatctaaccgatccgattttcatgagagcccgaatatcgtggctaaaaaaacgggagccggcgaaggtaggtccctgattttgaacggccatatcgatgttgtgcctgaaggaagcgtaaaggattggaagtatgaaccgtatcaagctgtcgaagaaaacggtaaaatatacggccgcggttcaacggatatgaagggaggcaatacagcccttctttttgctttagaagccctgcacgcctgcgatgtcaaactgaagggagatgtattgtttcagagtgttgtagatgaagagtgcggcggcgccggtacactgtccgccatcatgagaggctatcgtgctgacggggcactgattcctgaaccgacgaatatgaaactatttattaagcagcagggttcgatgtggtttcggatcactgtgaagggattatccgcacatgggggcacacgctatgaaggggtaagcgcgattgaaaaaagcatgcacgttatcacagcgttacaagagctggagaaagtccgcaatgcgagaatttcagatccgctgtatgacaatatcccaataccggtaccggtgaatatcggcaccatctcaggcggtgcctggccatcttcagttgcagaccgtgtcgtcatagaagggagatgcggaattgctccccatgagaaaacagaagctgtaaaacttgaattggaaaactggctgaaggatttagaataccatgacgaatggtttaaacgccatcccgtacaagtcgaatggtttggcgctcaatggctgccgaatgatttacctgatgatcatcctttaatttctgtgctgcaatcagcctatcaaaaaatgaaacagacagagccgattattgaggcttccccgtggggaacggatggagggcttttgtaccatgcaggagatacaccagtaatcgttttcgggccgggggaaacaaaaacggctcatcaggccaatgaatacattgaggttgaagccatgatagaatctgctaaaattattgcactttttgtcatggattggtgcgggcttcatacagatggggaggatgcggatgctcaagtcaataaagagtagcggtgtcacagcagttttggaccatgacggttttaataaacgaatcagagtggtccgttatgacggagccattgagaaggttctgccggatatcgtggcagcggcaaaagaagagaatgcagaaaaaatcatcgtctatgcgaagcagcatgatgagccaatgcttgccaaacaattatttgcgccggagggctatctaaagggctattatctcggccattcggcttgtgtcatggtacgttatctgtcagaaagccgaagacaaacagattcttatacagaggaacaggagatcatcgaagccatatatcgcacagcgccccgtcttcgcaacgacagtaaacccgtttttacgatgagaaaagcagaaacaaacgacatgtaccagctatcgatgctgtataaaaaagtatttcgcacgtacccaaccccagtatttgaccccgcttatattgaaaagacgatgaatgcaaatacggtgtattatatcatgtttgatcatgaccgcctgatcagcgcagcaagcgcagaaatcaatccagagcttgggcatgcagaaataaccgattgcgctgtgctgccggaatatcgcggccattcgttaacaagctttttaatcgaggcgttagaaaaagaaatggctggaaaggatatctttcatgtgttttctctcgcccgtgcttcgtcttttgggatgaatgctgtgttgtaccattcaggttatcagtatggcggaaggctgatcaataattgctttatagccgaaggccttgaaaacatgaatatttggtgcaagcaactgtaagtcaaaatatgcgcgaggaggagttcgtttgaaaaacaaatggtataaaccgaaacggcattggaaggagatcgagttatggaaggacgttccggaagagaaatggaacgattggctttggcagctgacacacactgtaagaacgttagatgatttaaagaaagtcatcaatctgaccgaggatgaagaggaaggcgtcagaatttctaccaaaacgatccccttaaatattacaccttactatgcttctttaatggaccccgacaatccgagatgcccggtacgcatgcagtctgtgccgctttctgaagaaatgcacaaaacaaaatacgatctggaagacccgcttcatgaggatgaagattcaccggtacccggtctgacacaccgctatcccgaccgtgtgctgtttcttgtcacgaatcaatgttccatgtactgccgctactgcacaagaaggcgcttttccggacaaatcggaatgggcgtccccaaaaaacagcttgatgctgcaattgcttatatccgggaaacacccgaaatccgcgattgtttaatttcaggcggtgatgggctgctcatcaacgaccaaattttagaatatattttaaaagagctgcgcagcattccgcatctggaagtcatcagaatcggaacaagagcgcccgttgtctttccgcagcgcattaccgatcatctgtgcgagatattgaaaaaatatcatccggtctggctgaatacccattttaacacaagcatcgaaatgacagaagaatccgttgaggcatgtgaaaagctggtgaacgcgggagtgccggtcggaaatcaggctgtcgtattagcaggtattaatgattcggttccaattatgaaaaagctcatgcatgacttggtaaaaatcagagtccgtccttattatatttaccaatgtgatctgtcagagggaatcgggcatttcagagctcctgtttccaaaggtttggagatcattgaagggctgagaggtcatacctcaggctatgcggttcctacctttgtcgttgacgcaccaggcggaggaggtaaaatcgccctgcagccaaactatgtcctgtcacaaagtcctgacaaagtgatcttaagaaattttgaaggtgtgattacgtcatatccggaaccagagaattatatccccaatcaggcagacgcctattttgagtccgtttttcctgaaaccgctgacaaaaaggagccgatcgggctgagtgccatttttgctgacaaagaagtttcgtttacacctgaaaatgtagacagaatcaaaaggagagaggcatacatcgcaaatccggagcatgaaacattaaaagaccgtcgtgagaaaagagatcagctcaaagaaaagaaatttttggcgcagcagaaaaaacagaaagagactgaatgcggagtggattcttcatgaaaacatgcgaatggtgcggcgagcttgaagcagtgcccggcaggaacacggtgtactgggagcttcctgatggaacgagggctatagaactgacagacacccctgccatggtatgttcttcctgcggtatgacctatcaagaggaaaacacggttaaggagattgaggatcagctgcttttaattcaaacaaaaaaactgcctgaaagcctgacatatcagcagctcatggagacagaaagaattttgaaacgcaactattttgacttctcctgagtcatgtttcagtattcttttgttgtaattttacacttgaactgtataatagaacaacaaaagacagacaccaggaggggaaacccatgaaatccttttatcactatttattgaaatacagacaccctaagccgaaggacagcatcagtgaatttgccaatcaggcgtatgaggatcacagctttccaaaaacatctaccgattatcatgaaatcagttcatatttggagctgaatgctgattaccttcacacgatggcgacgtttgatgaagcttgggatcaatacgagtctgaagtgcacggcagataatagctgtttcatccgcagatcactgcggatttttttatgtcccccataccataattggatatttcctttggttttcatgcccatgcgaattggcttcacccggcatacgatagcgtatgagaaatgttgcggcgagggggagacaccatgaagcaaaataaaccgaaattccaagtaggggatatcgtagtcgtcattatgtatggaacagtcggcaccatcacaaaagtacaccaaattgataaacactatctttatgaagtcaatcataacgaagttttatactttgaatcatctattcagctttataaagattatgagggtgtcattgtcgacatggagaagcttgatattgagtatgaattccttattggggacgttgtttatgtaaaagattatggaaaagaactctttcgcattatcggccatagaacagaaatttggagatatttagaagatggctgggaagatatcatttatgagctgacccgtttaaaggatggagagtggcttgaaacggaggaagaggatctcacgctggtgcttagaaaatatgaaatggaccagtttgtgcatcagctgttgtttgtccattatgtcggagaaactggccatgagatcggcgaagatatcgcatcgtctgctcttcttcagtttgaaggcgatgatgaagatcaagatacccttcacatccttgctgtgtcaattgttgatgagcttctggatatttataatgactacaaaattctgtacgaaatgtttcatgatgaagaatataaagacatgatgatgtttgttttggaaagtttaaaagagcatttcagttagtttgtgaacatacggatcaagacatataaaaaatatggcagacagccccaaatcatcacacgcgtcattcctttgagcgttttttccattatgatatcaaatctttctccgtccagtgcttccatcattttagcaatcatagcgtcagcctcccatggctcgttttttattcaatatatgactgaaagaattgtttagaacaccgggtataattcagcctgttttttcataaaacataaaaaaggaggcggtacggagatgaaagaaatagatcttgtgattgatacggaagaaatcgctgaatttttttacagagagcttgcaagacggggctacataccgagtgaggatgagctgtttgaaatcgctgatattacctttgattatttgatagaaaaatgtatgatagatgaagagctggatgaagatgagtgaggcttaaaaccggagcggtcagctccggttttattattcatgttctatgacttctgtgaaaattgaggtggttaaattgtacaagcccgttagcttgtttcttttctttctcattctagctgcggccattcatacaaatgctgttcaatctgcagatgaagcaataagcaaggcagctgttttgatccgtcagccatggcttaatgaagtcatgacggggatcacgcatcttggtgcttcttcttttctgctccctctaattgtcatcattggagcaggcatgtttttctacagaaaaacatgggacggcctgttgatgctcttagtattcggcacagatcggctgttaaacaaagtcttaaaagaatggatcgaaagagtgaggcctgattttgcaccgctggttcatgaatcatccttcagttttccgagcggccattccatgaatgcagcttgtgtctatcctgttattgcttactttttagtgaaacacctcccgtttttgtccaagcataaaaaattggtatatatcatagccggtgtaattactgttttggtcggcataagcagagtctatctgggggttcattttttgacggatgtgttaggaggcttcagtctcggcttgcttctgtttttcctagtaaaaggttttgacgaaaagattaagcggtttcgacaaaaatagagagaggaaaacacagcaaaaacgccaatatgttaaagaaataaaagggaggggatcttgatgatgttatccgtgtttaaaaagaagtcttgttcctatgacgtgacaatatttcagacaccccggtttggcgaaaaaaagggctacagagccgtctatcgaactgaactgaacgggagcgatcatcaagacgtgctgaaaagagcattctctttgtttaatgtattcgacactgttccgagtgattatgatgcaagattcatggccacaggggacgtgatcctgattgatgaaggcagaaaagggaaaacatattatcaactgcttcccgccggctggaggaaaatcaatcgtctgattgtacaaacgacataatgaaaagaaaactgcggaaacccgcagttttctgcagttttaaggcttgcgtttggcagcagaatattctttcccgtgtgcttcttcagctgcaatgatatctttttcaggtatatgattgttctttttttggccggtgatccggttacgatgttttttacccatgtcctacccctccttcctgcggttaggttttcaaattaacaccccgattatccgtttttctgaggaagtgcctaacagatcctcgaacatttcttttttcgacatattcctttataatcaatgctgaagtttgtttcatcatgacattcgttgtaaaatggacgggctggatgataatttagatttacaggaggatatgagatgagtgtacatataggtgctgaaaaaggacaaattgcggatactgtgcttttgccgggagatcctctcagagcaaaatttatcgcagaaacatatcttgaaaatgtagagtgctacaatgaagtcagaggcatgtatggatttacgggtacatataaaggtaaaaaaatctcagtacaaggcacgggaatgggtgttccgtctatttcaatttatgtgaatgaattaattcaaagctacgatgtgcaaaatctaataagagtcggttcttgcggcgctattcgtaaagatgtcaaagtgcgagacgtcattttggcgatgacctcctcaactgattcacaaatgaacagagtcgcttttggaagcattgattttgcgccttgcgcagatttcgagcttttaaaaaatgcctatgatgccgcaaaggataaaggtgtgccggtgactgtaggaagcgtatttacagctgaccagttctacaacgacgattcgcaaattgaaaaacttgcaaaatacggtgtgcttggcgttgaaatggaaacaactgcattgtatacattagcagcgaagcacggaagaaaagccctgtcaattctcaccgtgagtgatcacgtattaacaggagaagaaacgacagcggaagagcgtcaaacgacatttcatgatatgatagaagtggctttacattccgtatcacaataaaatatatcaagaggcgtgctgggtgccggcagcctcttctttatgaatgcggaaacgattgataaaaggaaggtaatgtaatatgaaaaagtccggtaaatggttctcactggctgccgctctgagtgtaacggcaatagtcggagccggctgcagcatgtcgaacggagatgctcaaaaggatacgaaaaccacagcagaaacaaagcaaacagaacaaaaaacagctgacagcaaaaaatcaaacactcaaaacagtgagttttcattggaaagccagtatttcaatgatattaaaaaagtcgatggtctggaaaccattcaaaatccagaaaatatactcgcgcttgtcaataaacaatatgcactgcccggaaactatgaacctagcgatcttgtcatacctgatgtagagttttcttttgaagaaaagattcaaaaacgttacatcagaaaagaagcggccgacgcattaaaaacaatgttcgatgctgccaaaaaggaaggctatgaactggcagctgtctcagggtaccgttcgtatgacagacagaaagtcatttttgacaatgaagtaagcctaaaaggggaaaagaaggcaaaggaagcggtcgcttacccgggtgaaagcgagcatcaaacaggccttgcgatggacatttcgagccggagcaatggctttgagctaaatgaagcgttcggaagcacggcagacgggaaatgggtgcaggacaatgcttataaatatggctttattattcgctatccgaaaaataaagaagatatcacgaaatatgaatatgagccatggcatctgcgctatgtaggcaaaaaagccgcaaaggtcatccaagataatgatttaacgcttgaagagtactttgaaaaagtgaagaaaatttaaaatgaaaagcccgcttacactagataagcgggcttcattgtgtctggtgaatctagcatttgttctatgcttaccagaagaataaaccagccagagccactcctgcaattaaaccgagggaaatcccgtaagccgctccatatccccaataaccgccccaatatccgtaaccgaaacctcttggccctccgccgaccggagctataaaaactctgtctcttgttacacgggtaattctgccgacgtgaactctcccgcctctctctgtaattctgacgactttaccttgatggtttttgcaaagatgataatatctctccaatattgttcccctcctatcctgactttctatcagcatatgatagataggaaaaaaaggttggacgaaaacagggggcgatacgccgttttacttgtacgcgataaaaatacaatgacccatgtactcactatataactgcatgagctgataatgtgtttgaagcgtatcgtaatagatgggatcaatcgtttgcgataaatccatttctgtggttggttcaaattccatgtcttctggaagaagtgacatcgcttctgttttttgaaagccataggatcttaggagtttatgccattcgctttcttcatgtaagcaaggaaatccgtaaaaatccatcatttgcttcttttctgcagggggcattggtttttttaaagcagcttcgataccaatcagcatcccgccgggttttaaaactcttgaaatttcttgaagagaggatgtcaggcgtgaaaaactgaggaccgattctgacaggacgcaggaaaaggactcagaagaaaacgggagatgttccagctccgcctgatatgcagggatggcaagcccttcattcgcaaatctttttttcgctttctcaagcataataggatctttatcaacgactgttacaggatacagcaaatgtcctaaataagccgccgtttgccctgttccgcatccggcatcaagaatcggctgatccggagagggtgcagccttttgcaagaccgcttttgaaaaagccagcccgcctgggtgcgcccctgcgacaccgaataaggacagcatttctaaatatcggctcaatatcgaatcctcctttttccttatcatatgtcgtataaagacataggtttatgaaaagcaaaagaagggcgtttctctttcgtttctgctccgagttgacgaataagaattcgtccatgataataatgtaagaagaaaaaggtggtgtttaattgaaacggcaattaaaactgttttttattgtgctgatcactgcagttgtcgcttcggcgcttactttatttattacgggcaattccagtatcctgggccaaaaatcagcaagcacaggagacagcaagttcgacaaattaaataaagcgtatgagcaaatcaaaagtgattattatcaaaaaacagatgatgacaaattagtagacggagcaattaaaggaatgattcaatcactggatgatccgtattctacatatatggatcaagagcaagcgaaatcattcgacgagacgatttcagcatcttttgaaggaatcggagcccaagtagaggagaaagacggagaaatccttattgtatccccaattaaaggttcacctgctgaaaaagccggtatcaaaccgagggaccaaatcattaaggtaaatggaaaaagcgtaaaaggcatgaatgtaaatgaagccgtcgctttaatccgaggcaaaaagggcacaaaggtgaagcttgaactgaacagagcgggagtggggaatatcgatctttccattaagcgcgatactattcctgtagagactgtctattcagagatgaaagacaacaacatcggagaaattcaaatcacttctttctctgaaacaacagctaaagagctgacagatgcgattgacggtttagagaaaaaaggcgccaaaggctatattttagacttgagaggcaacccgggcggcttaatggaacaggcgattacgatgagcaacctgttcattgataaagggaaaaacatcatgcaggttgaatacaaaaacggttcaaaagaagtcatgaaggccgaaaaagaacggaaagtgaccaagccgaccgtcgttttagtaaatgacggtacagcaagcgcagccgaaattatggccgctgcccttcatgaatcgtcaaacgtaccgttaatcggcgagacgacattcggaaaaggtacagtgcaaacggcaaaagaatatgatgatggctctactgtcaaactgacagttgccaaatggctgactgctgacggcgaatggattcacaaaaaaggcatcaagcctcaagtgaaagctgagctgcctgattacgcgaagctgccgtatttggacgcagataaaacgtacaaatcaggtgatacaggcacaaacgtcaaagtggctcagaaaatgctcaaagcacttggttacaaggtaaacgttaacagtacgtatgaccaggattttgtatctgtcgtcaaacagttccagaaaaaagaggagctgaaagaaacaggcatactgactggcgatacaacaacgaaattaatgatagaacttcaaaagaagctgtctgataatgatacgcaaatggaaaaggcaattgaaacactgaaaaaagaaatgtaaaaaaaccatacgcggctgccgcgtatggtttttttatgcacccttttgatttggattagcgtcttgttttttgccaaataaaccttcaatgacaggattggatcccacgtttttaacgaacagcggattcaggatcaccacagcgatcatgttggcggccaatccccagaatccttcataaatgccatgtgcggattgagtggtatacacaataaacgtaaccgcaaggccgactaataatccgataactgtcgcttctttcgtttgacgcttccagaatagactgacagcaatcgccgggaagatttgcaccatgccggatacacctaatagctggagtgtcactaaggcagtcgggaacagcattccaaacagcagcgcgagaccgatgacaacaaagaccattgaacgtgtgacgagggtcagcttgctttgcgccacattcggatgaatcaaatcccggtataggttgttggcgaataaattcgatgcgccgattgccataatggaacaaggtattaatgaagcaagagcgatagtggcatatgcaaagccttgtgccacgccgccgtaagatgtttgaatcaaatgcagcagcgcgagtcttggatttgtatcttccggcaggataagaaaggcgataaagccaagaaaaatgaccaaaattaacacaatattgtaaagcggcaaaaacatgctgttttttcttactgcatcagcgcttttcgccgtgaaaactcctgtagcggcatgtgcccacataaaaagtgccagagcggaaacaatagatgctgtgataaaccaaggaatgccttttggcccttctgacggtatcgtcaacatttgcggcgcttccttcactaacgtgtcaatcattggcgtccagccgttaaaatgaatgagagggagggacaccaccataaacagcataatgacccatactaaaatgtccttaatgatggctgtatatgtgggccctttaatcccgctgaagaatgtgtaaagagcaacaagaataaatgaaatgatcacaacgaattttacgttaatatagccagtgccggcaacctgaagcgtgtcttgaatgccgctcagctgaaggcatatgtacggaataagcatgagtaccccgacgatggcaacgaggcttgccaaaagcttactgttaaaacgttcccgggcataatccgcgagtgttgttagtttatgaattttcgcaacattccaaagttttggcaagaagaagtaggcgataaagtaggccaacacagaataaggaatggcgaaaaatgcaacacttccgcctgtaaaagcagtactggtcaaccctaagaaagtataggccgtataaaggtcagcgcctactaaaaaccagacgagaagaccgccgaaacgtctgccgccgacagaccattcttccacagaagtgcgtgaggatttgtctcttccggcgagaaagccgatacagacaacggttaaaacaataatagcagtaatgagaagtgcagtcagattcccttgcattattcaagtcctccatcttttttttgcatctgataaatgccaaacgagcataacggcgtaacaataatccacagcagcagccaaaagtggaaaaacggcaggccgaacataatcggttctattcgattcacaagcggcaaaagcgcgagctgaacgaatggcaaaagaatgagaataacaataagtgcttttttaaccatttactttcctcctgaaacatgataatgctcactataatagcagttgtaagaaaagatcacaagataattattagaaaaaaatgattttttcaattatttaatcaaaacacatggtttgcatccttttcaataaaggtttaaaataataaatatcttgaaatcgagataaataggagtgagaaaatgaaaacagaaggattgcaccatgtcacagcattcgccagagatccgcaagaaaacttgcgattttatacagaagtgcttgggctcaggcttgttaaaaaaacagtaaactttgatgatcccggaacgtatcatttttactttgggaatcaaaacggagatcccggtacaataatgaccttttttccgttccaaggaagcggacagggaacggtaggaaaaggccaagcgggccgggtgtacttttcagttccctcaggctccctgtttttttggaaggagcgtcttgagaaaagcgggctgagcctagaggaaaaaacgttgtttggtgaaaaaggtcttatttttgatgatacagaagaccttccgctggcgatcatggaggatgcgaaaagcggcaaaagcgagtggacgcctgacgggatcacaacaaatgaagcaattacgggaatgaaaggtgtgctgctatattcctacgacccgcaggcgaccatacaattgttaacggaaagctttggatacaccaaagtggccgaagaagaccagattgtcagactggcaacctcagcggccgtcggcggtgtcattgatgtccatttacaccctgaaaaaagaggagtcggaggatatggtacggtacaccatatagcgtttcggacaaagaaaaacgaacaggcgaaatggctgccgattattgctgaaaaccatctgccttcgtcagaaattctcgacagggaatactttacatcagtttatttcagggagaaaggcggtatcttatttgaaattgccacagatgaaccgggctttatgacagatgaaacgttttctgagctagggacttccttaaaactgcctgaatggctggagaaacatagacaccaaattacagacattttacctgaactttaaaagggggaatttataatgaagcatatttatgaaaaaggaacatctgacaacgtacttttgctgttgcatggcacgggcggtaatgaacacgatctgctttcattggggcggtttatagaccctaatgcccatttgcttggtgtcagaggatcggtgcttgaaaatggaatgccgcgatttttcaaacgtctgagtgaaggagtttttgatgaaaaagatcttgtggtgcggacaagagaattgaaagattttatcgacgaggctgcagaaacgcatcagtttgatcgcggcaaagtgattgcagtcggttattcaaacggcgcaaacattgcggcaagcctgctttttcattataaagatgtgttaaaaggggctattctgcatcatccaatggttccgattcggggtatcgagctgcctgatatggcggggctccctgtttttatcggtgccgggaaatacgatcctctttgcacgaaggaagaatcagaagagctttaccgctatttacgtgacagcggggcatcagcctccgttttctggcaggacgggggccatcagctgactcagcatgaagctgaacaggctcgtgaatggtacaaagaggcgattgtataaaaaaaccttagtccggatttcggactaaggtttttcatatccttacagccaagttgatacttttgaaagcggcagacggttgctttgatgcgcaggcttcactgctttgccgattgaaattagcataaccggaacatagcgctcactgatatcaaattgcttttggaactgctctttgttaaatccgccaattgcgcaagtgtcataaccttttgcttttgcggcaatcataagctgcatagcagctaaagaagcatttaagaaagcggaatcacgtgcgaattgctcgctttggtaagcaccgttgatttggccgagcaatgtttgtttgatttcatccgtaatatagccttggcttgctaattcggcataaacttcttcaccgttttcatttgcctttaaatcgcctaaaatggcaacaacagcagaagactcaacgatttgtttttgattatacgctacaggaagaagctccgcttttgattcatcgctgtggaatactgtaaaatgccaatgctgaaggttccaagcagaaggcgctttagcggcaaagtctaatagctcagtcagctcctccttagagatcggggcatttgtatcatattcctttacagatgcacgtgcttttaaaacatccagagtattcgtcatagtgtttcctccttcggataaacgtggtatgataatagaaaagttagaagcttactaaatgtaacttgaaagattattgtaatggatcattgaatacatgtcaatcaatagatgaagggatgaagacttgtgggaaatacgatgtgccctaaaatggaatccgcattctcattgctgggaaaacgatggaacggtctgatcatccatgtgctaatggatgggccgaaacggtttaaagagataacggaaacaataccgatgatcagccaaaaaatgttggcagagcgcttgaaggagcttgaacaaaacgagattgtcgaacggcaggttctccctgaaacgccggtcaaagtcatctacacgctgactgaaaaaggaacagcgcttcaagctgtatttcaagagatgcaggcatgggccgatcaattttgcgagcctggtgacacagtgtgtgaagaagagaaataaggaaagcggcgtctgaaaaagcgctcttgtttccatggtgagtcatgtaagtacggttcacacccgtttacatgactttttatatttgtcagattgacatttccggattggcaaaagtgtcatgtgcatatgaaggggatatataaaataggaaatgatcaataagctataacatccaacctattgtaaatggggattatgatgtatcttattatgcaaatcagcaaaattttatattttcggccaaaacccagtcagcttccaattggcatttaaaccggatataaaaggaaatccaggtttttcgtattgctggatgcttctatactgatgacttccgcatttatgaaaaaagagagagcttcattggagctctctcttcttttttttgtggggagacgaaatcttatagttttccattcaaaaattgcgcctcaccgagaccaaaactccagtctgcgtcaccattctcagtaatagataccatgaggtcttcaggggaaattccgcatttttcttctagcctttcagcaagcagagcatacaatttttccttttggctttcggttcttgctttgcttgtcatgctaatgatgaccatatccttggttctctgaaaccctaatcccgtatcctggattataagctcgtttgcgggatgctgatggacaatttgataacggtctctttccggaacaccaaacgcttcaaccatcgcttggtgagcagtatctaataacaattgcagcgatttttcgtcacggccttcaattacatcaaaacgcaataatggcatgtgtactcctcctcttgtgaagttgttatccgtctgttctcatattgtctcgtttgctttcagacaatggagagatataatgattggcagtcaactttaaaaaacataacatataaccaaaagttaatcaacatataactaacgaatcattaggttaggcggtagataatcgagacaagctcataaaaacgattgacagtcattgattaggagattagtatgaacatattagttgatcaaaagataacaatcatataaccaagacgttgttatttataaatgaaagcgttttctattcatctaggcatgaaaagcgccgaaacaatgtcgcgagaatcatataaaacacttttggaggggtttccatgccgattttaattgtagctgtcggagtgctgattctgttatttctcattattaaagtaaaattaaatacctttgtctcactgattgtcgtttcatttttagtagccatcggacttggaatggatatcaataaaattgttctttcaattgagactggaattggcgggcagctggggcatttagctttagtgtttggacttggcgcgatgcttgggaggcttgtctctgatgctgggggcggctaccggattgccattacgctgattgacaaattcgggaggaaacgaatacaggcggcggttgtagttgcctcttttatcatcggtattgcgctgttttttgaagtgggtcttgttctgttgataccgattgtttacgcgattgctaaagaattaaaaatgccttttctgtatctgggaatcccgatggccgccgccttaaatgttactcacggatttttgcccccgcatcctgctccaactgctatctcagttgcatacggtgctcatattggcaggtgctgctttttggaatcatcatcgctgttccgacaactgtgattgccgggcctttatttaataaatttgcgatgaaacgttttcctggtgcgtatcaaaagcatggaaacttatcggggttaggaccaaggaaagaatttcagctggatgaaacaccgggctttgcgatcagtgctgtcacgtctttattcccggttatctttatggcaatggcaacagttttttctttattattgaatgaacattcaaaaggaaaagacattatagaatttatcggcactccgggaacggcaatgctcatttcgctgttgcttgcactctatacgatgggatatgcccgtaaaatacctatgcaggaaatcagcagatctatttcagaatcaatttcgcaaattgcgatgatgctgctcatcataggagggggaggagcatttaaacaggtgctgattgacggcggggtcggcgattatgtcgctgattttttccgtcaaacaaacatgtcgccgctattcgttgcatggaccatcgccgcggttctgcgtctgtgtctaggctctgctcccgtggctgcgcttaccacagcgggaatggtagctccgcttatggaggctggcagtgtaacccccgcgttaatggtgcttgcaacaggagccggcagtgtcattgcgtgtcatgtaaatgatgcaggattttggatggtaaaggaatttttcggcttgagcatgaaagaaacatttcaaacctggacgctgcttacaacagttctttcggttacaggactcggctgtgtgttattggcagagcttgtgatgtaacaatcatagacagtccgtagcccaatcgtttttcttccttgctgaatactttacgtataggcagacataaaggaggaaaaaatcatgtaccctcatcattcgtattatcgcggaatcccaggtccagccggatatccggcgcgtagtccttttttgtttggcgctcctctagtcggcggtttattaggcggttttctcgggagtgcgctgtttaactattctcgtccctatgcctatcctcctggcccttatggatacggaggcggaccgtacggttttggtgccggcgtgccatacgggggatatcccggcttctattaataaaaaacggcctgcatcgattgcaggccgttttttatcggatgatttctacctcggacatattgtagtcttgctgcttttgaaacatgacttccagaaggccatccttatagacggcttttgttcctttgcgtttgactaaacaaggaaggtttacttttttcggatgatctgctcttgggaggttttccaaccataattcgtgagatgtgtgtttgattctcacttgttccagccattcttcgctgattggcacctttacaaacacatggtctgctgtttcgaatatatcaatatcaggtttgacatcaggttttgcatcaggtttggcgggatgttctttttgggggagaggatcgcggaaaggaaattgagccgcataatcactgccgaacacactttccatcacacgattgacatacgtttcaacttctttcggatcagctttttttaatgcttctttagaaaattgattgtggaaaggaaagtacttgttccactcaaacattgtcttcacatcctttcttcacggacaaaatagtatatgcccgccagatctttcacgtgatataatataagatgctctaaagaaaggcagggatataaatgcaatattcagaaacaaaaaaaggcgttatttacacagccgtttcctttatcatgtggggcctgtttccgctctattggaagcttctcgaacagctgccggctcttgatattttggctcatcgtattatatggtcttttgtttttatgtgtatcgtactttttttcttgcggcaatggaaaataggatggcaggagctgcgctctctgaaaaagaacggagggatcctctctttatttcttgcttctatcctgatttcgatcaactggtttgtatacatatgggctgtaaaccatggctttttgcttgaggctagtcttggctattacattaatccgcttgtatcagtgctccttgggattttatttttaaaggaaaaactgaatcgcctgcaattagtggccgtttcgattgcggcagccggtgtcatcatctcggcgttccaatacggctccattccttatgttgcgcttctcctcgcattcagctttgggctgtacgggttaagcaaaaaaagaacaagcctgccgagcgccatcggtttaacgctggaaacattcatgattatgccgattgcattagggtatttgctgttcagcggacatgttcagccagcgggtgcagaaagcggagggacgtggctgcttctctttttggccggtgtgtttacggctttgccgctcttattgtttgcggaaggagcgaaacggctgccactgtatcaagtcggtatcttacaatatattgcgccgaccattacccttctgatcgggctgtttgtttaccatgagccattttcaagctcgaaggcttttacattcagctgtatatgggctgcgctgatcttgtttacgttttcacaagtgaagtggaaacgggcgtcaaaaagccattgaggcctttggcttttcagctgatgcatatattatgtataatcatttcatgtatgtaagacataaaggagcaagacgatggacaatgataaagagatagtgaaagcctatgcttcactttggaataaccgatctctcgcacatgatgacgcagaagcggtagcagaggcgattgatcttgagctgttggataaacgaacacatccaagactccgaaaaccgatgctggaaaaatattttgccgcgattcagcgcattgtgaattcacagctcgaaccggctgtgaaatatcagctggtcaaattacatacagaacgtgcagagtatttaaaagaagaaagaggggagcaatcatgaaagcgatcataaaagaagatgtgcaagcatctttagaacgatatgcggaccgccctgtatatatccatttagaaaccaccacaggttcttattcagcgcacttaaatgaaaagaacatgacggttgttgcgtatattcgcaatgcaaaagttacttatcatcaggcaaaaatcaaaggcaacgggccttaccgcgttggcttgaaaacagaagaaggctggatttatgctgaaggcttgactgaatacacggtagatgaagaaaaccgtttattaatggcgggacatctgccgggcggtaaactggctatttctctgcaaatcagcgaaaaaccattcacagtttaaaagaaaagggtgaataataatgaaagaacatgtactagtaatcctgcctcaccctgatgatgaatcatatggagtggcaggcctcattgccttaaacagaaaaaaagacattcccgttacgtatgcctgcgccactttaggtgaaatgggcagaaatatgggcgatccatttttcgcgaatcgggaaacgttgccgctgctaagaaaacaagagctcatcaatgcttgcaaagaaatggatatcaatgaccttcgtatgcttggactccgtgacaaaacgctcgaatttgaagacgatgagtatttagctgatatcatggaagagatcatagatgatgtaaaaccaagtttaattgtcacattttatcccggacacggtgtgcaccctgaccatgatgcatgcggggaagcggttatccgtgcattatatcgcaaaaagaaagaagaccgtccgcgtacaatctgcatggccattacccgcaacagagaagaggttctcggcgaagctgatgtcgtgcttgatatcaaagaagtagctgatattaaaatgaatgcgttaagagctcaccgcacacaaacagaaggcatgctcagagagcttgaagagaaattgaaaaataatgaacctgttatggcaacatggtttgaagaagaaatatattggacgtatcaatggaatgattaatcaaaaaggtataaggccttaagccttataccttttttaattttaagtccgatgcaattgctgaagcgagagtggatctcaaggaaataccttcgaaagacaaacctagctgaaccgctgtttgcgcgatttccggacggattccagacaaagttgaagaaacaccgattaaacgaagcgcctcaatcagactgaacagctgatgggcaaccatcgtatcaatcacagctactcctgacaaatcaatatacagttgtgtcaccttttttttcgcacattgatgcagtgtgttttccataatcagcttggcgcggactgtatcaatatctccgattaaaggcagcagtccgacgctgtgaaacagcacgatgaccggagcgctcaattcagtaatcatatctttttgggcctgaagctgaaggcttgtgtttttgtacatttcttctataaaaatatgaatcacaagatcaaacgcttttataagggcgtgatacaggtcttcggcttcttcgcttttcacagtatcctgattgagatggacaaattctttcacataggaaacatataaatctctcactctgacaaactcccgaataatatagtggataggagtttttaaatgctcttgatcctgtgtgacttcaaaagcccattctttcagtataggcaagtatacgtcctcatcatctataaaaatacggtttattttatagttaaaggcaagattctggctctttaaattgtgaatgacaacagggtctgttgaggcataaatggaattgggatcagtctcctcgattgtttcataccatgttgaactgatggtttccgcatgctgggaaagatactcgaataattttttgttttttgccatgattgatcacctcttttaaatgtgttgtttttgcgaataacgtttttgcagttttgccagcctgaaaaacagcccaactgctccggcggcgagtcccgctattaatccaatccaatagccgaatgcaccgaggcttgtaaacgtaccgaccatataaccgaccggaaggccaatgacccagtaagagacaaaagcggccgcaagcgtatagttcacatctttgtaccctctgagtgctccctggatcggtgcggcaacagcatcggaaagctgaaaaaatagcgcataaattaaaaagtgctgtgtcagccggagcacatcggggtcagaagtgtacatgcccgcaatttgctctctgaataaaaggatacaggcggcagtgaacaaagaaaagccgatcgccatcatgatgccgattaagctatatgagcgtgcatccttaaaacgggctgcacccgcttcaaatccgacaacaattgttagagccatggacacgctaagcggcagcatatataaaagagacgcaaaattcatggctgcctggtgggacgcgatggtcactgtatgaaaatggctcattagaagcgtgacagctgcgaaaatgctcgtttcaaaaaacacggcgaacccaataggcagcccgattttgagcaaatttttgcatgctttccaagagaacttatacatggtaagaaaaatcccgtattcagaaaacggtgcgtttttatgaataatgaaaaaactgatgatgcagatacaccagtaagttaacgcggatgccagccccgcgcctacacctccaagtgccggcattccgaacttcccgaagataaatacataattcaatacaaaattgattggaagagaactgagtgtaatcatcatggtgactctcgtttttcctaatgagtcgatgaatgatctcaacacggtgtaaacaaataaagggaaaattcccagtgataaaaagcctaaaaagtgtttagcaatctgatgcacgtgaatatcaaggttcaatcggccaagaataaggtcaactgcagcatatccaatcaataaaacggcgatgctaagtagcgcggccacgtatacagcctgtaaaacagtaaaggggatcttctgttttttctctgcgcctaatagctgagcgacaatcggggtgaccgccattaatatacctgcaagtcctgtgtaaacaggggtccaaaggcttgagccaatcgcgacacccgctaaatcagcggggctgactttccctgacatcaccgtatctagaaaagtcataagagaaagccccgcctgggtaatgaatatcggtattaaaatgtgcaagagctgtttgattttttcccgggcattttgagtttctttcatacattgatctccgtttctttttcataacgagagaaattataacattttatgtataaaaagcaatgaacgccgggcctattctttttttgtcggtttcgtttttctaaacatttgggcataaataaaagaaagcgaaatcacgcctaaaaaggtgcaaatatactgaatgattctttcgatttccattctttacatccctcctttaccaatagaatgtgcatcaataagataagcattcgtgaaaagttggaaatttgaacaggagatgaagattatgcgctatgagcagatatcagaaaatgcgttcaaggggaaaatacaggtgtacctagagcaaatattaggtgatgcatctctaatcttgaaaacgcttcacgaaaaagaccagtgtctcctttgtgaattagatgaattagggcacatttttcaggacatgcaggggattgcatcctccttttatttgcaatcatacattgaggaatttacgccggcatttattgagctggccaaggcgattaaagccttatcggaacataagcatggagctttaattgtgattgaaagagcagacccggttgaacattttattcaaaaaggcacctccctacacgccgagatcagctcttcattaattgaaagcatcttttttcccggaaaccctcttcatgacggcgctttgttagtgagggaaaacaaactcgtgtcagcagccaatgtgctcccgctgacgacgaaggaagtggatatccatttgggaacccggcaccgggcggctctcggtatgtcgggctatacggatgcactggtgctcgtggtttcagaggaaacagggaagatgtcgtttgccaaagacggtgtattatatccgttaatttcaccaagaacgtaaaaataataaaaagggcctgattaagaatcctatcatgagacaaaatgactgaattcgtatctttattaaagcattcgcttcaagctgaatgctttttgtcttgaagacagggaatataaactggtagaaaagttatatgtaatgaatattaatcaagtgaaatactttacctgtttatgtatttatagtaccgtataaaatattatataaattttcaaaggaagggtgctgccgcatggctaatgtattaatgatcggtttccccggtgaagggcatattaatccctctatcggtgtgatgaaggagctgaaatcccggggagaaaacattacgtactacgcagtgaaggaatataaagaaaaaatcacagctcttgatatagagtttcgtgagtatcatgatttcagaggagattacttcgggaaaaacgcaaccggcgatgaagaaagagatttcacagaaatgctctgcgcttttttgaaagcctgtaaggatatcgcgactcatatttatgaggaagtcaaacatgaatcgtatgattatgtcatatatgatcaccatcttctcgcgggtaaagtcattgccaacatgctgaagctgccaagattttcattgtgtacaacctttgcgatgaatgaggaatttgcgaaggaaatgatgggagcgtacatgaaaggatcacttgaagattcgcctcattatgaatcataccagcagcttgcagaaacgttaaatgctgattttcaagcagagatcaagaagccatttgatgtttttttagctgatggtgacttgacaatcgtctttacatcaaggggatttcagccactggctgagcaatttggcgagcgatatgtatttgtcggtccttccattacagaaagagccggaaacaatgatttcccatttgatcagattgacaatgaaaacgtgctgtttatttcaatgggaaccatttttaataatcaaaagcagttttttaatcaatgccttgaagtgtgtaaggactttgacggtaaagttgtgctttccatcggcaagcatattaaaacaagtgagttaaacgacattccggagaatttcattgtacggccgtatgtccctcagcttgagatcttgaaaagagccagcttatttgtgacacacggcggaatgaacagcacaagtgaaggtttgtattttgaaaccccgctcgttgtcattccgatgggaggcgaccaatttgttgtcgcagatcaggtggaaaaagtcggtgcaggaaaagtgttaaaaaaagaagaattatctgaaagcctgctgaaagagacgatacaagaagtaatgaataatcgttcgtatgctgaaaaggcaaaagaaattggacaatcactgaaagcggcaggcggctctaaaaaagcggccgatagcattcttgaagctgtaaaacaaaaaactcaatcagcaaatgcatagtgtaaaagcctgttcttatcgaaagaacaggctttttgccatttcataagagggatttgatacgccgatagagaattgattagaaaaatagacaagaaaggaggagaaactgcttcgttcatcaatagaaaaccatcatttttaccctcacttaaatagttccttagactttcgaaaaacatatcgtgcttatgtaaaatgttagatgtttatttgaaggtttaaaggtcgaacgatgctgaaaatgctgcgccaaatgtttgaaaagggtttaacttgctgaaaaattgacgataaaacagttgtgtgccatttttggaaacaaaatactagctgtttttacaaaaaaacagtttaggaggttgaatgaatgaaaaagaagattgtagccggcttggctgtttctgcagttgttgggtcgtcgatggccgcagcacccgcggaagcaaaaacgataaaagtaaaaagcggtgactctctttggaaactttcccgccagtatgatacgacaatatcagctctgaaatccgaaaacaaattgaaatcaacggtgctttatgtcggacaaagtcttaaggttcctgaaagcagcaaaaaaagcacgacatccccatctaattcaagcaaaacgtcaacatacacagttgcatatggtgattccctatggatgattgctaaaaatcataaaatgagtgtttctgagcttaaaagcttaaacagcctgagcagtgacctgattcgtccggggcaaaagcttaagatcaaagggacaagcagttcaagcggatcaaatggatcaaagaaaaacagcggttccaattcttcaggttcttcaaaaagtacatatacggtcaagcttggtgactcactgtggaaaatcgcaaacagcttaaatatgactgtagccgaattaaaaactttaaatggcttaacatcagatacactttatcctaaacaggtgctcaaaataaaaggaagcagttcgcctaagaacggaaacagcggttccaaaaagccgtcaaactccaatccctcaaaaagaacgacgtacaaggtaaaagcaggcgattcgctgtggaaaattgcaaatcggctcggagtcactgtccaaagcatccgtgataaaaacaatttatcatcggatgtgctgcaaatcgggcaggttctgactatttctggagcatcaaaatctaatccttcaaatccgacaaagccaacaaagccaaaagataactcagggtcaaacattcaaataggctcgaagattgacagaatgatcacggaagcgaaaaaatatgtcggagtgccttaccgatggggcggaaacacgcctgccggttttgattgcagcggcttcatttattacctcattaataatgtatcatctatatcaagattgagtacggcaggatattggaatgtcatgcagaaagtcagccagccgtcagtaggagactttgtcttctttaccacatataaatccggcccgtctcatatggggatttatctaggcggcggtgattttattcatgcaagctcatcgggcgtcgacatttccaatctcagcaattcgtattggaaacagcggtacttgggcgcaagaagttatttttaaaaatgagtatgacaaaaagccttttataggcttttttgtttataccagacaatgattgaccacactgttagaaaaaacaagggggagacagtatgcaccgtctcttgctgttgatgatgctgacggcactgggagttgccggatgcggacaaaaaaaacctccagaccctcctaaccgggtgccggaaaaaaaagtggttgaaacgtcagcgtttggtcatcatgtccagctggtcaatcgtgaagggaaagcagtcggtcttatagagatcaaagaatcagatgatgaaggcctcgatattcatatttccgcaaacagcctgcgtccaggtgcttctctcggttttcatatttatgagaaaggttcttgtgtcaggccggattttgaatcagcgggcggtccctttaatccactgaacaaagaacacggcttcaataatccgatggggcatcatgccggagatctgccgaaccttgaagtcggtgctgatggaaaggtagatgtcataatgaatgcgcctgacacttcactgaaaaaaggaagtaaactaaatattctcgacgaggacggaagtgcatttattattcatgaacaagcggacgattatctgacaaacccaagcggcaattccggtgcgcgtattgtctgcggagcccttttgggaaataacgagaagcagtaatatcatccaagcccttttgtattgagcatacaggggcttttttagtatactcgttaatggaatatgaataggaaagggaatctgtctatgacaactcaactacagcacttaacattgccggaagatatacaacaaaagcttttatcatataaagagcagcctatttccccggagtttcaatcgcttataggaacatcaggctatgaggcggaggatgaagccattttatttgacgccattattgcattagccatggggaaaaatgtcctgctgaaagggcctacaggttcaggaaaaacaaagttggcagaaacattgtccagctattttaataaaccgatgcacagcgtcaactgttcagtcgacttggacgctgaggcattggtcggttataaaacgattgaaaatcaatctggccaggcgacaatcgagtttgtttcaggacctgttacaaaggcaatgaaggaaggccattttctttatatagatgaaatcaatatggcgaagccggaaacactgcctattttaaacggtgtattagattacagaaaaatgatgacaaatccgtttacaggcgaggtcatacgggctaaaagcggtttcggagtcattgcagccatcaatgaaggttatgtcggaactgttcctctgaatgaagcgttgaaaaaccgttttgtcatcattgatgtgccttatattaaaggcgagctgctgaaacaagtgctcatgtctcagtcagccctgaaagacgagaaattgattgacagatttatcacgctttcctctgacttgatcgttcaggcccataacggacaggtgtctgaagaagcggcgtccatcagagctttaatcgatacatgtgatttagctgcttatattccgccgcgtcgtgccattgagcgaggaattgtagaaaagcttgatgatgatcgggaaaaagcggccgtccgaaatattgcagaaactctgtttgaatgagggggctgcgatgaaatttatcaaatttaacgacagcacgattgattcatttttatttatgatgctgactgatttggccaaaacactcaccaagagtgaagcggtagaagtggagtatggcgttcagtcctattacaatccatttgaaaagaaaatctatatgagccacttttggaaagacagggcagctgaggacatggaagcgggtctgaaaagcgacgtctacctgcgttcagtcggaacaagatatagctcgctgcatgagtttgcgaactttttgaatgatatccatcgtcatctcacctttaaaagttttgccaagcagctctttatgctgcttgaagacattaggatcgaagaatgcatcaaacgtgagcgtccgggtacgaaacatgtatttgcgaagcgaaaagacatgtacagaaaacatttctcaacccagctgaccttaaatttggaacgaagcatttttaccgatgcgctcttttgcgcgatctatgtcaagctcacagcggaatcgccgctcgagacccttccatccatgcgtgaagatatcgatctgatgcgcccgtttattgagcagcagctcttgcgtgtgtatgaagcagattcgacacggcaggttctgaaaattgttgaggacctcatggacggacttgaagaggtactcgataaagacatgttgaacacctacttctttttgcctgagcttgattacgcaaaagctgcagaacagccgttatttgaagaagagaaaaaagcgccgaagctgagtgatgacatcacgcttccaaaacaatcagacggtgatgaggatatccatgaagaagaaatgccgacatggcaccgggaaacagaagcaccgtctaaaagcttccttcaatttgatattgaacacggcgcaaaatcagatttaggaaaagatgcttcaagggaaggcgacgatggagatcaggcccttggctctgttcaaggatcagccagacaaacgaaacggaaagactattccaagctggaagcgctggagtctcaaaaagaccagccgaacggagcgggtatggctgacggcaaagaaaataaatatgcatttccaatttataaagaaccgcagccggcaaccagtgaagaggagctttcttataaacagcaggcaaaaacgattgaatcgtatcaaaagcgtttgaaacaaatgattcaaaaaacgcttgaacataaaaaaacattgccgagaacagatcttcatgccgggagactgaataataagcttcttcgttacttcactgagcgaaatccgcgcctgttctacaaaaagcaagaaccgtctacagaaatcgacgcagtttttacattgctggtcgattgttccgccagcatgttcgacaaaatggacgaaacaaaacgaggaatcgtgttgtttcacgaagcgctgaaatcggtagcggttccgcatcagattgtcggtttttgggaggacacaaatgatgcaaccgaaacaagccagccaaactatttcaatacggttattcccttccaatcatcattaagacaagattctggaccggccattatgcagcttgagccagaagaagataaccgtgacgggtacgcaattaggcagatgacgaaaaaaatgctgcatcgcagcgaggcgcaaaagttcttaattgttttctcagatggagagccggccgcatttggctacgaacaaaatgggatcgttgatacaagtgaggcggttatcgaagcccgaaaaagaggaatagaagtgataaatgtttttctctccaactcagaaatagaagaatcgcaaatgaagacgatccaggatatgtacggaaaattcagtatatttgtcccggatgttgatcagctaccggatgttttgtatccgctgctgaaaaaactgcttcataaaagcataggatagcccttaatcctatgctttttggcgtttgttttttcgaatgattaaattttttgttttttataaaggttttttactattttgtgaacaatcaaggtagaatcaaattgcaaacagtggtaaaatatcgttggaagcgtttttattacataattttggacacagcgttcgaaagttatttcaagatagtgaatcaatcacttgattatttaagttgggggtaatattcaaatgtttcaaaatagtatgaaacaacgaatgaattgggaagatttttacggtccgaacctcggctatgcgctggagctttacgatcagtatacccaggatccgaacagcattgacccggatttgaaggaaatgttcgacgagctcggtgctccgccaagcgatataaaagaggcctcgggaacaaaagaaaagggacgtgttacagccgatctgattcaaaagatcgcatccgcagtcagacttgcagaagatatccgaacctatggccatttgaacgcttccgtcaatccgctcagaaaggatgagaaaaagagcgaactttttccattatccgattacgggctaacagaagaggaaataaaagcaatacctgcgtctgtcatctgcaaagacgctcctaaaaacattacgaacggtttagaagccattcagtatttacgaaatacgtataaaagaaccatctcttttgaatttgaccatgtgcatgacttcaaagagcgcgagtggctgacaagaaagattgaatctggcgagctgttccagaagaactcagctgaaaagctgtcagctgtgctggaaagattgacagaagtagagggctttgagcagtttttgcaccgcacattcgtcgggcagaagcgcttttccattgagggtctggacgctcttgttccagtgcttgatgacattattgcacaatctgtcaaatcaggcacgacaagcgtcaacatcgggatggcgcacaggggacgcctgaatgtcttggcacatgtgctcggcaaaccgtatgaaatcatcttctctgaattccagcatgcgccgaataaagatcttgtcccgtctgagggatcaattggaatcagctacggatggacaggggatgtcaaataccatttgggggcgaatcgggagcttcaagacgctgaaacaaaatcagcgcgcattacgttagcgaacaatccgagccacttggaatttatcaatccgattgttgaaggcagcacaagagcagcacaggaaacgcgaacacaaagcggatacccggtacaagatgaaacaaaatcgcttgccattttaatccatggagacgctgcatttcctggggaaggaattgtagctgaaacattgaatttaagctctttaaaagggtatcaagtaggcggtgcgattcatattatcgccaataacatgatcggatttacaacagaaagcgctgaatccagatcgacaaaatatgccagcgacctggccaagggttatgaaattccgattgttcacgtgaatgcggacgatcctgaagcttgtctttcagctgttaagtttgcggtcgaataccgaaaaacattcaacaaggattttctgattgatttgatcgggtacagacgctatggacacaacgaaatggatgaaccgtcaaccactcagccaatgctgtatgatgctgtcagaaagcatccgaccgtcaaacaaattttcgctgaaaagctggtaaaagaaggcgtgcttaccgaggaagtcgttcaaaacatcgaaaaatcggtaacgaagcgcattgaggatgcatatcagaaagttccgtctaaaaaggaacacactgcttgtgaaattgaacttccagagcctgtatcaaacggtttcccagatgtggacacttcgattgattttgatgtgctccgcaagttgaatggcgaattgatcaactggccggagtcatttaatgttttcggcaagctaaagcgcattttagaaagacgcgccaaggcgttcgatgatgacagaaaagtggaatggtctttggcagaatcactcgcgtttgcttcaattatgaaagacggaacaccgattcgtttaacaggacaggattccgagcgcggaacgttcgcccaaagaaaccttgtgcttcatgacagtgagacgggcaaagaatttgtgccgcttcatcacttatctgactgcagcacatcatttgctgttcataacagcccgctgtctgaaggatcggttctcggttttgaatacggctataacgtgcattcaccggaaacgcttgttttgtgggaagcacagtacggagattttgccaacgctgctcaagtgtattttgaccaatttatttctgccggacgcgcgaaatggggccaaaaatccggattagtcatgttgctcccgcacggttacgagggacaggggcctgagcactcaagcggaagaatcgagcgattcctgcagcttgcagcggaaaacaactggacggttgccaacctgacaagcgcggcacagtatttccatattttaagaagacaggctaaaatgctgcttcgtgaagaaatcagaccgctcgtcattatgacgccgaagagccttcttcgcaacccaaatacggtgtcggaagtgcaggagctcagcgaaagccgcttccagcctgtttatgaacagtcgggactttctcatgactatgaaaaagtaaccagacttgtattatccagcggtaaagtgtctatagacattagcgatcattttaataagttagaagacggtaaagagtggcttcacattgcgagaatcgaacagctgtatccattcccggcaaaaggagtcaaagaattatttgcaaaacttccgaacctgaaagaaatcgtttgggtgcaggaagagccgcagaacatgggggcttggggttatatcagcccgtatttgacagagattgcaccagagggagtaagcgttcaatatattggacgaagaagacgatccagccctgcagagggagatccgacagttcataaaaaagaacaggaacgtattgtatctgatagcttgactcgcaaaaactaagggggaaatgaaaaatggcggaaattaaggtacctgaattagcagaatcaatctcagaaggaacaatagcccaatggttaaagcagcctggtgactatgtagaacagggtgaatatctgcttgaactagaaacggataaagtgaatgttgaattgacagcagaagaatcgggtgtacttcaagaggtattgaaagattcgggtgataccgtccaggtcggagaaattatcggtacgatttcagaaggcgcgggtgaaagttctgcccctgctcctacagagaaagcagaaagcaaggaaagcgtaaaagaagagaaacaggctgaaccagctgcacaagaggtgagcgaggaagcacaatctgaagcaaaatcaagaacgatcgcttctccgtcggcccgtaagctggcgagagaaaaaggaattgacctgtctcaagttccaactggagatccgcttggaagagtgcgcaagcaggatgtcgaagcgtacgaaaaaccggcatcaaaaccggctcctcagcaaaagcagcagcctcaggctcaaaaagcacagcaaagctttgaaaaacctgttgaagtgcaaaaaatgtcacgccgcagacaaacgattgcaaaacgccttgtagaggtacagcaaacatcagcgatgctgaccacatttaatgaagtggacatgacggctgtcatgaatctcagaaaacgccgcaaagatcaattctttgagcaaaatgaagtgaagctcggctttatgtctttcttcacgaaagcggtcgtggctgcattgaaaaaatatccgctgttgaatgcagaaattcaaggcgatgagttgatcgttaaaaaattctacgatatcggaatcgctgttgctgctgatgaaggccttgtcgttccggttgtgcgggatgcggatcgcctgacatttgcaggaatcgaaaaagagatcggcgagcttgcgaaaaaagcaagaaacaataaattaacccttagcgagcttcagggaggctctttcacgattacaaacggagggactttcggttcattgatgtcaactccaattttaaacagcccgcaagtcggtatactgggcatgcataagattcagctgcgccctgtagccattgatgaagagcgtttcgaaaaccgtccgatgatgtatatcgctttatcttatgatcaccgaattgtagacggtaaagaagcggttggtttcctcgtgacaatcaaaaatttactggaagatcctgaacagcttttattagaaggataataaaaaagggtacatcacgataaagtgatgtaccttttttgatgcatatttaaagtgatagattgctgctttcggatccagcttgtatctttttcacttttttggaccaatatgttgcaagcatagaacctgaaaggttatgccacacactgaatattgcgcttggtacggcagatagcggtgagaaatgagccgtggcaagtgcagccccaagcccggagttttgcatgccgacttcgattgcaatcgctttttgagacgggtaatccatttttaaaagctttgcacaaagaaacccaagtaaataaccgataccattatgcaggataacaactgaaaaaatgagcaaccccgattgaagcagattttcccgattgccgctgacgacagctgagacaatcgcaacgatgccaatgacagaaacaagcggaagggcatgtacggcttttgccacttgttttctgaaaaacattttgacaatcagacctgcaatgatcggaaataaaaccgcctgtaagattgagataaacaaagaccccggcgagacaggaagccattctttggcaaacagcataatcaacaacggtgttacaacaggtgccaataaggtagaaattgtcgtaaccgcaacagaaagggcagtatttccttttgctaagaatgtcataacattagatgcagttcccccgggacagcagccgacaagaataacaccaactgcgatttcagctggaagatgaagcccaaatgcgaggccgaaagcaacgagcggcatgatcgtatactgagctattactccaataataacttgccaaggctttctgactagctctttgaaatcatcggcttgcagtgtaaggcccatcccaaacatgataatgccaagaaaaatcgtaatataagaactgatccacgtaaataaagatgggaaagaaaatcccagcactgcaaaaacaatgacccatatgccaaaggtttgtcctgcaaaatgacttatttttctaatgatgtccataaaaacactcctaacacacttatcaagaacttcagcagaaattcttgcaaatttcataacattctcttattataaataattttctgaataattcaatattagtttttggtagatgtctatagatatatgatgtaaactaatcaaaatgttcttgactatataggaagatattcttacaatgaacctttataatggttagatcaaataggagtgatacggtgaaggaagcaaatcaatggtcttcgaagctcggctttattttagccgcggcaggatcagctatcgggcttggtgcgatatggaaattcccatatgttgccggaaccagcggaggaggcgcatttttacttatttttattttatttacggttttaatcggactgcctttattgttaggtgaattcatcataggcagaagaacacagaaagatgccgttcagtcctataaaacacttgctccaggaacgaagtggcattggatcggttatttaggcatggtgacgtgctttattcttctatctttctacagtgtggtaggcggatggattttaatttatattataaaaggcttcactggcggtttatcgcaaacatctggttttgatacgatatttgcaagtaccatttcaaatccttatttggctgtaggaggccagctgctctttatggtggtaacaattttagttgttgcaaaaggggtaagcagcggaattgaaaaagcaagccaagtattaatgccggcgctttttctattattcatcattttaatggtgcgttcggttacacttgatggcgcgatggaaggtatcaaatttttcctgatgcctgatttaactgcaattgatgccaataccattttatatgcaatgggacaatcctttttcttattaagtgtcggtgtatctgtcatggtaacgtatagcgcttatttagagaaacaggaaaatctggtacagtccgctgtatctgtaactgttatgaacatgcttgttgctgtaatggccggaattgcgatttttccagctgtattttcattcggcctcaagccagaccaaggcccggttctgttatttaacgttctgccgactgtgtttaatcaaatgccgttcggaattatctttttattagcatttttacttctatttttatttgctgcattgacatctgctttttcaatgctggaaattttggtcgcagtactgtcgaaaggcgatgtcaataagagaaaacgattcgcttggttaggcggaattgctatttttattgtcggtgtgccgtctgcattgtcatacggtgtcttaagtgacgtctctatatttcatctgtctatttttgatgcggccgactatcttgtgagcaatattttaatgccgttaggtgcgttactgatttcgatttttgtcccgctaaaaataccgaaacaggatttgtttgacgagctgaaaagcggttccaatctcaaacgaaagtggtttgcggtttggctgctgcttattcgatatttatctcctgttgccattatcatcgtgtttttgcatgtggtagggattttttaacacacgaagcccccgaggaaagggggctttttttaatagagcttccaaacgacttcttttgcctgctcaaaacgtttttcagcctcgcgccaatccacgacattccaccagtgatcgacatagctggcccggtcatttttgtattgcaaatagtaggcatgctcccatacgtcaagcggtaaaagggggatcacatcccattgctggtgtttttctgccgttaaaatctccagccgtcctgatcgaggtgcccagaccagaatggcccagccgacgccttccacttttttagcggcctgggtaaaatgttctttaaaagcggaatagcttccaaatgaaaggtctatcatttggaacaatgcccctgtaggacgccgttttccgtttggatgcatagaaaaccaaaaaatactgtgcaaataatggcctgctccatggaacgcaagctctctttcccaatgagtgattaagtcataattctttgttgctctcgcttttttaagctctgattctgctttgttcaggccatcgacatagctttgatgatgttttgtatgatgaaggaccataatatcgcgtgaaatataaggttctaaggcggagtatttgtaaggaagctttggcagcacgtgtttccctatagggacatatgcgcgtctttcacttgtatcatctgattctgtaatatcccggtaaagggcagcggcctgtttataccaatcttcttctgttgtttggtcatcttccagagcctcaatcatcttgtcgatttgatcttcaaactggtcaagctgtcctcgcttttgaatctgatctttcagggcttcacaccaattgaacatctccgtttgataagattcacgtttcatttgctgtctccttttcaatagaatctaaatatttcccgacagccagcaaagagaatacatatggataactgtgatagcgaatataaaattgcttcggcaatccgatccctgctggatacgcgaggctatcggcgctatgcgaactgctgtcggtaaggtattgcatgcctttcacaacagacggatgttcggaattttcatatgtgagcaaagcgtctaaagcccaggccgtttgtacaatggttcctctatgaagcggtacatatgttttgatttcggcgcttttgcaggattctccccagcttccgtcatcattttgtatggatttgagccaacgcagagccttttgtataccgggatgctttcggtcaaccccgcatgcatgcataccagtaagagcagcccaagtgccgtaaatgtagcaaacaccccatctgccgtaccaagacccattttgttcctgatgttcgaatagccacttcactgcgcgttgaatatgttgttgtttttctgtgaagccaactttctcgcctaaaaagtgcagtactcgtccggtgaggtcggcggttgaagggtcaactgcagcgtcctcggcggattcaagcggcagaaggcggatcagtggatggttcacgtttttttcaaaagcagaaaatccgccgtcattgttttgcatcgataaaagccaagataccccccgctcccatgctgcaggagaatgattgcggggaatcgcctttaaaacggctgcagtgtcgtcacagtcagggttatttgtattaatgtttgaaaacccccagccgccaggaactgaatttggatttttgacagaccaatctgctgttttggtatgctggcgttctagcaaaaagtcggctgcttttgtaacagagccatccgtttcggtcacaccatttttttgaagggcatagctgattagagctgtatcccaaacagttgaagtagagttttccagataaggaatcccgttgcatttagtcaccagtgatttaatgccggtaatcgctctcctgataataggagaatagcgtgacacaccaagtgacagaaggctgtaaaccatatatatggttgcgctcgcatagctgtataatgttccatctttttcaatccggtccagcatatacgttttagctgtctgtaggcccagctgctgaaaagcaaatggtgcatgaaaaacgcgtttccaatgtgacaaaatagacgtgagatctctttcatcgaaagcatcagaccgaagccaagtgaaaggattttttgtcatgtgcggatcgagatggcgaagagatgaaatattgcggttaataaggacaaatcgctgattgagtgttacagccataggagcaaaatgaatacgggcatatgagctgaactgatagaaatgaatcggcaatgttggggggagcgccatgagtgataatggtaaatacaaagcaggccaagggtaaagcccgttcgcggcaagcatccattttgtcataaaatgaacatgtctcaaaccgccatatgagatgataaattgttcagctttcttcatgtgcggctcagatctgtgaaaacatcctgaagccagcatcccgacatatccttggacggtagccgttagatttccgcacgtttcgtcgggatagttgataaatgtgccgtctggctgctgttttgcatgaatgccggctgcaagggatgatatcagttctttttcattttcgccttcatctagtgaggtaaggagcaaaataaaaaaggaatttgtcatgattggtccttcaaagcaaaatgtccatgaaccatcagcattttgcctgtctcttaactcggtaatggttttcttttgaaaacgcctcactttctcctgaagtgtgcccatcacgctcaactccttcagaagcatatatattcagcgtcttttactgccattacagaaagaaaaaaactgctggcaggcagcagttttttaaacatacatgttagtcttcaaggtttacccatacacttttgacttctgtgtaattatccaaggcatatgatcccatttctcgtccgagtcctgactgtttataaccgccaaatggagacgccgcgtcaaacacattatagcagttgacccaaacggttccggcttgaagtcggtccgcgatatagtgagcctgcttgacgttctctgtccatagtccggctgcaagcccatattctgaatggtttgcccgttcaataacttcatcgactgtttcgtacggaattgcagtcagcacgggtccgaaaatttcttcttttgcgatggtcatttcgtcttcaacattcgcaaacacagtcggtgcgacaaaatatcctgcttcaaaaggacagcttccgccggtcactgcttttgctccttcatcttttcctttttgaatataggaaagaacgcgctcatgctgttccttgcttacgagaggcccgatttgagtatctttatgaagtcccgctccttggcggagtgactcagcataggatgccatttcatcaacaacttcatcatattggtctttatgaatgaagacacgtgagcccgcacagcagacttggccctggttaaacatcacaccgtttaaagcgcccgggatggctttttttaaattcgcatccggcagaagaatattaggcgattttccgcccagctccaatgtcacacgcttaatgcttttcgctgcggtggacatgattttctttccgatttcagtggaaccggtaaaggcaattttatcaaccgcttcgtggttcgtcagcgcttctcccgcatcttcaccgaatcctgggatgatgttgattacaccggcagggaaaccggcttggtcaattaattctgccaaataaagagctgaaagcggtgtttgttcagccggtttgaggacgattgtacagcctgttgcaagtgccgcgcccattttccacatcgccatcaggagcgggaaattccatggaatgatctggccgacgacaccgacaggctcatgacgcgtataattaaaataagcgccggaaaccggaatcgtctgtcctgttatttttgtacaccagccggcgtaatagcgcatatgctcaatagccagcggaatatctccattagtcgtttcattgatcggtttcccattatcaagtgtttcaagctgagcaagctcagttttatgctcttccattaagtctgccagcttatacatcagtctgcttctcgaagctggagacattgttctccattcaccttggtcaaaggctttccgggcagctttaacagctttgtccacatccgcagcctgggcttcatacagcgtcatcaaggtttcgccggtcgccgggtttggagtgtcaaaggttgcccctgaggcactcggaacaaactttccgtcaatataaagcttctttgttccctgtaaaaatgtctccagccttttcgtcacttgcatcgttaaagaactcatccgtaacaaacctccagtcattttttatggtctgttctgagattcttggtgatagcacattgattcctggattgaatagcagaaataagctgtgatagttgcttcaaacgtaagcgtatacaaacattctataatagaaatcaaggcaaaatcaatgaataaccgatattgcaatttacaaaagaaaaaagctacaataagcttatagataagaaaaggagatttcatcatgattcataaaaattggcttgaaaaagaaaccattaaaaaagtaaagtgtgtgcagacaaacgcaaaaaaatatatcgtaaaccgcgttttaacgccgggaaaagaatatgaagtaaaaaatgaaacagaggagtttctctttgtggtcgacaatacgaataaagtcggcggctattataaagaatacttcgaagagatgtaatgcttccttgaagcatcaaacagattttgttaaaagcagtcgatacataaaaccgcagctcagctgcggtttttttgtggttaaaacaggaaatataaaacaaaattaaaaaaatcattaaaaaccacttttttataaaaacattgctgaatattgaaacttttttctctatatgtgcgtattacttgatgacaacagcttaaaagccaaaaaacaaatcaaaaatttgaaaaatgtaatctgttcgtaatggtttaaatgtcttctatgtcgtattcttatatagggataaaggacttatttttatgtagtgaatgataaaacaaatagataaatgcagaaagaggggttcttcattgggtattttttctgttagcagatcaacggacgcaaagaagcttgaggctttgctcgttgaaggggaaagaatagaatcgatttataagctccgagtggaccaaatttgctttacaaataagcggatcattttctttgacaataaaatgttttctaaaaagaaggttcgtgtatttcttccatataaaacaattgaaagctttgccattcaagaagcgggaatgtttgatccggacactgggcttttattgatgacaagaagcaaaacgttcgaattagaatttgcgaaagacaccgatttaagcgaggttcaggcggtgctgacaaagcatttgtgcagctgaatatttgatgagccagccgttcaaaaaatggttaggctttttttatatataaaaacaagaacagggcatgtgcgccctgttcttattacttattacaccacactgtttttcgctgagttcgaatcaacaagatctgcatctaatacatttgaaatcggtacgacaagaggagtaaagtcgccattttcttctccaaacccttgatttattttagctgataaaaagtaatcgacctgctgatacggaccgagtgttaaagaggaaccacggtccattgtattgattttaaatccgccgacattcacgacggagggagaaaagaacatctcatcacttccttttgattgaggagttaaccgcttcactttcaaaagaggccggagaatcaatttggtctctgtcatccacatggcttctcgtgcccataaatccgctcgcatctccaaaattctgtccgtagccttgattttttttatcagaattttgccattctgccaataaattttgtcctacgttaaccgctgaagcattttcaaaggaattaattttcagcatgaaaatattaatattgatatacggagttggttgaaccacaggcaaacctcctttctatatttgtatgctggcggttataaagtatgttaagacagggggcttcaaatggatttcgaaaagatgaagcagtggatggaattcgcacagcagatgtacggcggtgacttttggaaacaggtatttgatgaagaccaaaaaaccccttttatgacaaatggccaatctccgtttccgtttgcgcagcaagatcagcgagggaaaggagatgcttcatttccgagcatggatattgtagataccgttacggaagtacaatttttaatttatcttccaggctaccgtaaacaagacgttcacatattatcgtacggagattatttagtggtgaaggggcagcgcttttcctattttaatgaacaggactttcgccaaaaagaagggagatacggaagttttgaaaagaaaattccgctttccgatcatcttcatggaaagatgaatgccatttttaaagacggaatcctatacatcactattcaaaaagacgaaggtcaagcgaaaaccattgttattgatgattgattttcatactgagtgcatctgccccatcacggtcatcaattgattcaatcggaatgaccatgacaataacatctgcattttgttccccaaaaccgttatttcttttgatagcagagcgcctgttccttaactccgcagaaccaaaggtaagggatgagccggtgcctatcgagttagtcttgagatgagaaatattgatgttagtcggaagcatgaaaacctctcctttctatgggatatacctcattatatatgtagacgaaagaggagtatgcaaagggtcgtgatgtcatgaaaaaaatgttccggtcgctgatcaggcattgcttgaaaccagaacttgacaaactgcgtgaatgtgaagaaagactctcagtgattgagaaacaaaaacaaagcagcaaacaggagtctgaagaaacctatatacatattgaaacgctgaatgtcgaaaaaattgactatcatcttgaattcggcgagctgaccattgatgaactgagcggcagattaaatataggcgcaacctattatataccgccagaagagaaggacaaaaagtgccaacgaaaacccgaagcaccatcgacgccagcggtcacgatccgttcaaaaaggcagtagctcatctttccatcgatgtttccatgtttgacagaaggcaaaacgggaaacaggatagaaaggagaggatatacatggcactgacaaaagaacaaacacagcatctctatcataaattgctcgatatgcaaaaagaattgtctggcgagaaaaaggaaacagaatcaatgacggaagaagtgggggagctttccaatggggttgacaaccatatggcagaccacgggacgctcgtcacagaccggatgacagaccaaacagtgaaagagattgaccgggagctgttagaggaggtcaaccgtgcattacaaaagatgaaagacggaacttatggcgtgtgtgaaaaaaccggccaagagattccttacgaaagacttgaagctgttccttatgcaagaatgacagttgaggcccaagctgatgtggaggatgatctggagacagatgctccttcttatgaaagagagtttcataaacaggtaaaagacttatccaacaaagaaacaattgatcaaaaaagctcgcagacgtatgaaatcttggatcgtgaacaagattcgaagtaaaaatggcaagcaagtacaccgatattagatgtacttgcttttttttgaaaaaaaatctcatattcaaaataaagtgattgactttacgtaaaaaagaaagtaacatactatttgtaagtaaatataaaaagtttaccgggaggaatacaaatgtctacagttttatttgtaaaatcaagcgaccgtacagctgaagaaggcgtttcaactaaactttacgaagctttcttagctgcttataaagaaaacaaccctaatgatgaagtggttgaattagatcttcataaggaaaaccttccttaccttggcagagatatgattaacggaacatttaaagcaggtcaaggaatggaaatgacagaagatgagaaaaaacaagcagcaattgctgacaaatatctggaccagtttgtaaaagctgacaaagttgttttcgcattcccgctttggaacttcacagtgccagcagtgcttcatacttatgttgattatctgtctcgcgcaggcgttacattcaaatacacacaagaaggaccagtcggtttaatgggcggcaaaaaagttgcgcttcttaacgctcgcggcggtgtctactcagaaggaccaatggctgcacttgaaatgtcattaaacttcatgaaaacagttcttggtttctggggtgttcaagacttgcacacagttgtcatcgaaggacataacgcagcacctgatcaagcgcaagaaatcgttgaaaaaggtttacaagaagcaaaagatcttgctgcaaaattctaataaagccaagactcctatcgttacaaataggagtctttttgtatatacacattaatatagaagaaaataatcattcgcttttagcgaaaaaggctgttttttttattgtaatatattttttatttgtcgaattgtcaggtattttggagaaaaagcagttttattcactggaaaaagtttttctaaacaattgttttggcctcttgattaaaagcgcctgatggtgtactatattaaagaagctactttgtgcgtattgttaattaagttttaacctttaagctgtaatagggagttttatatcgaagccggaatgtcatgcctccattgcagaggacgacaggaacgtttctgcaaacacccactttgaggagtggtggtttaaaactttcttacttgcatacggcaagacgtagcgaaagccatttccttttcggaaatggctttttattttatctaaaaaggtttggtatagtgaatattccatttttatgtgaaagaaatgaaggccgcttttttatgatatgatgggagaaattcaaggaaaagcgaggtttacacgttatgttacatagagcccaatcccttctggctcattattttggttatgagaagtttcggagcggccaagatgaagcgatccgcttggtgacggaagcgaggcaaaatacggcctgcattatgccgacgggaggcggcaaatcggtttgctatcagattccggcattaatgtttgaagggacgacgatcgtcatttcaccgttgatttccttgatgaaggatcaagttgatgcgttagaagaagcggggattaacgccgcctacattaacagcacacaatccaatcaggaaatatatgagaggctgaacggactcaaagaaggagcttataagcttttttacattacaccagagcgactaacgtccacagagtttatccggattttgcaggggatagatgttcctttggtcgcaatagacgaggcgcactgtatttctcaatggggccatgatttcaggccaagctacaggaatattgaaatcttgttccgtgaattacacgacaagcctgtcatcatggcgttaacagcaacagccacacccgaggttcatgatgatatttgcaaacagctgcatattcaaaaagaaaacacggtatataccggatttacccgagagaatttaacctttaaagtagtaaaaggagaaaataaagatcggtttatagacgaatatgtgcaaaacaacaggcatgaagcaggaattgtctataccgcgaccagaaaagaagctgatcggatatatgagagattgaaacgaaatcaagtcagggcaggtcggtatcacggaggtttggctgatgatgtgagaaaagagcagcaggaaaggtttcttaatgatgagcttcaagtgatggtggcaacctctgcttttggaatgggtattgataaatcaaatatcagatttgttctgcatgcacaaattccgaaagatatggaaagctattatcaagaggcaggacgagctggacgggacggtcttgccagtgaatgtgttctcctgttttcaccgcaggatattatggtacagcgcttcttaattgagcaatcagaacatgaagagaaacaaaagcaggatttaaaaaagctgagacaaatggtcgactactgccatacggaagattgtctgcagcgttttatccttatgtatttcggagaaaaggagcctgatgcgtgcggacagtgcggaaactgtaccgatacaagagcggcccatgacgtgacgcgggaggcgcaaatggtcttatcttgtatcattcgcatgaaagaacggtttggcaagacgatggttgcacaggtgcttgccggctccaaaaataaaaaagttcttgaaaacggcttttccgacctttcaacatacgggatattaaaacaccaatccgttggcgaaatcagtgattttatcgaatttcttatttctgacgacttcatcaggatgtcagacggaacgtttccgactctttttgtcagcagtaaaggaaggaatgtgctgaaaggagaattatcagtagcgagaaaagaagcgttaaaagcggcagcgattactgaaaatgacgagctatttgaacgattgcgcatggttcggaaagaaattgctgctgagcagggtgttccgccatttgttgttttctctgaccaaacgttaaaagaaatgtcaggaaaacagcccgtaaatgatgatgaacttttgtctataaaaggagtcggagaacaaaaaagagcaaaatacggccggctttttttacaagaaatacaagcttatgcaaggatgacagactaaaaaacagaaaaaaaatctttttttctataaaaaacacattttattttctctgtttcgcctcaaaataaaaagacctgcgaagcctattatatcaagggttcagcaagtctttccatcagagagaaatccttcatgtaaaggaactgtaatctaaatcatatctttttgttattgatttgacatttacgtgtgttacgatatcacctgttagccgccaataaaaagctaacaagggaggatttacttatgaagaagacgattatgtcctttgtggcagttgctgcactttcaacaactgcattcggagctcacgcttctgcaaaagaaattacggtgcaaaagggtgatacgctctggggaatctctcagaaaaatggagtgaacctaaaggacttaaaagaatggaacaagttaacttctgataaaatcattgcaggagaaaaactgaccatttcttcagaagaaacaaccacgactgggcaatatacaattaaagcgggagacacgctttctaagattgctcaaaaattcggcacgacagtcaacaacctgaaagtttggaataacttaagctctgacatgatctatgctggatcaactctttcagtaaaaggtcaggcaacagcagcaaacacagctactgagaatgcgcaaacaaacgcacctcaagctgcaccaaaacaagaggctgtgcaaaaagagcaacctaaacaagaagctgtacaacagcaacctaaacaagaaacaaaggctgaggcagaaacttctgttaacacagaggagaaggctgttcaatcaaatacaaataatcaagaagcttcaaaagaactaacagttactgctactgcttacactgctaacgacggcggcatttccggcgttacagctacaggcattgacttaaataagaacccgaatgcgaaagttattgcggttgatcctaatgtaattccgctaggttctaaagtctatgttgaaggctacggggaagcaacagcagcagacactggcggcgctattaaaggaaataaaatcgacgtatttgtaccaagtaaaagtgatgcttctaattggggcgtcaaaactgtaagtgttaaagtcttaaactaataatatagattgtgataaaagacatgagcttttggcttgtgtctttttttgttctgcttagagctgtttatatcatatgctgataaaagaaagtggtcccgtttttctctttatgtgcgattcaggggctctcgggttaaaagattggttccacattacagagacattcggcatcatgacatttatagctggttgttactatctttgatcagcgaaacgagctggtgttgtatcttttttggcagataataagcagttggatgtagcagatgccatttatggaatcggattgatttcagacggttttttattgtgatattaggctcttgcagttgggcatggcagcttcgggagcgaagtggcacaactttgtcatactgaaaatacaaaataatcaatatcagaaattctgctgatgtgcaatggccgaccattttaacagggatatcattcaatccagtcttttattgggctgttaaccaagcaatcgttcagcgggcgtaggagcgaggatatggatcaatttaattctggttgcgacgaggttctcaaacgggaatttcaggttaacaaaaaggatcctggcagatgccaagatccttttttatttaaaccagcctttttcttttgaccgggtaatggcttcaattcgatttttcacttcaagcttttctagaatcattgagatataattccgcaccgtcccgcttttgatgctgagttcctgagcgatttcttttgtgtttttaccgtcagccacaagttcgagcacttctttttctctatctgtaagagggttagcttcgctgtataagtcctccatcagctcaggtgcatagatgcgttttccgttcatgacgctacggatggcgttggccagctcttcactcggactgtcttttaacaaatagcctttaacgccagctttaatagctctctgaaagtaaccgggtctggcgaaggtggttaagatgataattttgcagcctgtatcttttagctcctcagcagcttcaagccctgtttttccgggcatttcaatgtccataatacatacatcaggctggcgttttttgacaaaatcaacagcatcttggccggttgtacctttgcctacgacttccatatcgtcttcgaggtttagaagtgatcctaaagcgcccagcagcatttgctgatcttctgcaataaatatactaatcatataagccatcctttatgtttattttgaattattaggaattgccatggtaagcttggttccgttttcggtattgatgtgaaggcttccatttgcaaactcaagccgttctctcatcccgagtaagccatgtccttttgaaaaggaattttcttctcctttgaatgttccatcgtcagacactgttatcacaacttccttccagagctgctgaatgtcaactcggcaagttttagcctggctgtgtttgacgacatttgtgacagcttcctttaagcacatgctcaaaatgttttcattcagcaatgagatattttcgggccatttctcttcttcatagataaacataatgtcagctgcttcgagaatttgtttgatgttgatcaattcatccttgagccgtatgcccttcatagaggaaacgatttttcttacttcatttaaagaagttcgcgctgtttgctgaacacttttcagttcacgagctgcttgttcgggatctttgtatatcaattttcttgctaagtcgctttttaaaccgataagagaaagcttttgcccaagcgtatcatggagatcgcgggcaattcgctgacgttcttctaattttaccagttctgcaatccgttcatttgcatcctcgagcttttcttcaagccgttcgcgctccttgcggcttcttatactaaagggcaataaaattgcgctgatgagggtaatgacgacaaaaggaatttgtgtcagaaagaattccttttttaatacgagactgaaattggctgcgacggctgcgcttattaaatggacataatataaaatatgaaaagggacgcgttccttaatgtttccaataaaatacgcgataaaaaaagcaaaataaatataactgaacagggtaatggaggcggttgaaatgccaattaataaaaatccccacaaataaatggtccagccttttgagacaaaagcaaatcgatataccgaaaaaaataaaagcgtcaaaatgatgccgacaataataacaaatgtagatgatgatttccatataaagtagaaggggaggatgaaaaatatcgtccatatatagggcgtaatcccgtttagtttttgaaatgtaaaatgatttttaatcatgatcttacctcattttcagcttttcatcttacttgtaactttatcattgtgaaagccagaatgcaccctccaacaataaaaaggaagccttctagtatattagaagacctcctttatcatcaggcattcttccgcagcttctgtttttctggtgaatcaggcggaaggcttacaggtatatgttttatagcccgaaatgacacaaactgtttgttatcttcatcccaaagacggaacgcgagtgattgcaggcttgtttttaaggtgattgtcggtacgttttttaatggttcgtgatgttcatgagcaacttcaagcttatagttaggcacctttggactcaaatgatgaacgtggtggtaaccaatattgcctgttagccattgaagcagtttcgggagtttataaaatgaactgccttcaacagcagcctgaacgtagctccagttttcatccgcttcaaaataagaatcttcaaaggtatgctgcacataaaacagccaaacaccgattgaacctgaaatcagaaatatcgggccttgcaccagtaaaaacgattgccagccaaagatcagacagcaagcggcagccaacgcgacaattgccagattcgtaaggtatgtgtttacacgttccttgcgtcttgcgccttttttgttaaaacggttcgtgatcagaaaaacataaatcggtccgagaataaacatgataaacgggtttctataaagtctgtatgcaagctttgttcgtctggatgcagctttatattcgtttactgttaacatccagatgtctcctgttccgcgtttatccagattgctgctagtcgcatgatgaatcgaatggctgtgctgccattgaagatacgggaataaagtcaggacacctgtcagaaaaccgagaatgtggttatagcgtttttgtttgaaaaaagattgatggcagcagtcatggaagatgataaaaattcttgtcagaaaacctgcggcaatcaccgttaatgctaacgtaagaagataggagatatcgaggctgagataagcaagaaaccataggccgaagaatgggataaacgtgtttaaaagctgaatcaggctgttttttgtttcaggctgagcaaatgcagcgacttgctttgtcagctgtttttgtttatgtgcaatggtttgttcagtcatagtaagtatcctctcattgtgtgtctcggttcagtatacgctaatgagagaagtcttttgtagtagcacacatcatgcctcctatatgacatttgtcatgtctcgtgcggcatacataaccgattgcgctaaaaaagcttgtaaaaaaatttacaagctaattaatgtttatcaatccatatgcgtgatgtacccgaaatagcttcaatcctgcatgttcctcctatagggaacgtggcaattggcgaggtatgtccggcatttatatttgcgatgatcgggatgtcggataattctttttttgtttcgatcatggtttttacaagatccattgatacgtttgatgctttctgaaatctgccgatcaaaatcgcctttacatgtgaaaaagcggggaggtggatgagtgattgcagatcgcggtcaaacatatggatgtctgacatataatcatcttcaatcaataaaatagtatgttctgtttcaggaaaatactccgttccctgcagcaaattaagcgtgcataagtttccgccaattaaagtgccttccgcataaccttcttggattacaacagggccgttattaggataaaaacgcctgttttcttgatccaaaaaccagcgatcatcgctccactcacttgaaggaagaatttcaaacggatcgtctgaagcgcagcaagaaagaaaatactcctctgtataatcaagcccttttttcattgcaaatgttgagaagtggggacctgaatacgtaacaagacccgttttttgataaatagcgttgcaaagagcggttatatcggaatagccgcacagaatttttggatgtcgtttgattttctcgtaatcaagataacgcagcagctgatttgaattaaaccctccgagtgtcgttaaaatcgctttgacgcctggatcaaaaaaggcagcgtgcagatcatggactcttgactcgatagaggatgaatcaaattcgttacattcatttgcgtgttcagcgatggttacccgataacctaagcgttctaacgccgtttttgcttggatttttgcttcatttgataatatagacatgctggtcgcgggagacacgatccggatttcgtctccctttttcagttttgaggcgtacatagaaccctccatcaatggttttataccattacagcatatcttggctctttcttccagacttttttacaaatcaacccacttaatgctgccggattgggtatcatgatcgatacatactttgaattgatgtttttcataaaagtgaatcagccggtctacatgattccaatcccgtttggcgatgtctcctgtgactttcggtatattgtggtctcttgctatatcttttaaatatttcatgcaaatggaaccaaacccgtgattcggagggccttttatatcgcctatatgaatggcatcgtccttgtaagacgctacaagtgaaaaacagccttttcctcggtaagccgttttacaatcagttagcataattttgcatgtttggccatcatcaatcgaggaaacaatcatccactcatcatgtttcgattgatcaataccaagcactttggcatctttagataaatccttcatattctcctgcatgcgataaatttgaaattctaaatcatttagttcttcttcaagctcttgacgatttttttctttaacagtaaacaagatcaaactcctttcaaaaatcagcttagaaacacagttaccaattgtattagaagagaggcgtattgtaaacaacaattccattattactagaaattagcggaaagtcaggtttgatcgtttttaagagaggaaaaagaaaactaacctgtgaaaaaggaggaatcggaatggcgattgattcattgattaacaaattacagtatgtccaattggaaccgccggataaaattctctctctgtatctcaatacagacatgagagatccagagcagcaggggggagaatggaagatcgccctaaagtcaggattcagccgattaaaagagtatttggcagctagtgatccagaggaggaaaagtgtctggatggaatcagggctaaaatgaatcaatacttgaatgcaatgggaaaagacatgccccgcagtctcgtgttttttgtttccgacagcggcatatgggagcctattaagcttcaagtccctgtagatacaagattttactgggaagaaacagctgtcctggatcagctgaaggatttgcgccaggcatacccaagtacggcgtttattttaactcagcagcatgaagtgaaaattattgaaactgttttagggaaaattgaggcggtggagcgttatgagtatgatatgatcaatgagtcttggaagaatagccattccgctgtagacaaagcgccaccatttgaagagaaccggatgagggaacatgtaacagagaaccaatcgagactgtataagcggctggctgccagccttgatcaaaaagctgccgcgaaaagatgggaacgaatggttattgccggggataaagaaacggccgatatcttggatcagcatatgaataaacccattcattcgaaaattcaaaagaacctgctgaatgaaaatgaacataaggtcattgaacatttgataaaagaggcgtaaacctaacaggccggggctaatagcctccggcctttgaagtgtgtctaatttctgacgaagcaatcgaaaccgttgacatcttctttgaatttgcatacgatttggatagccagtacaaattaggagaggtcaccaaatgaaccaaacagaaaataaaccgaaaaattacacggggattgtccttacgctgacagttctgattaacggtttaatcgcagtgctgttttttatgcctaaattagatcagttcagccatgcgaatattcacattttgccaatgctgaatgcgatattcaacagctttacgtttatcttcttattggccgcgctgattatgattaaacagaaaaatatcaaagctcacaaacgctttattttggccgcattcacaacaacattactatttttgatttgctatgtgacgtaccactcgattgcggaaaacacgctctatggcggagaaggtattatgcgcccgatttatttctttattttaattacacatatctgcctttctgcaattattgtgccgcttgcgctgtttacgctgatcagaggcttcagcatgcaggtggagcgccacaaaaaaattgcgagatggacaatgcctctatggctgtatgtaagccttacaggcgttattgtatatttgatgatttcaccgtattactaaaagccatactcagtatggctttttttacatgtaaacatggcaaaagcccaaattcatttttgggcttttgtcagtaaattgatagactcttattcatgagccttggattccatggtttcaagtgttgcaacctgcaaagattcttcaacagtttttgttttttcttttactttttctgcatacgtataatcaccgtagcaatacggatagcggaaatttttcgcatttcccccgcaagtatacagatcaggattttttttgacttgctgctcggagtattgttttgccaattcctcagtatgcgttcctccatgttcagctacaaaatcaatgtaacctgcccccatgttgtagctttgaataatggtatccaaatccacgcctttttccttaccggtcttgtacatgagggtaaattgcttgatgccttgtttaacactgagttgagggtctgttatctcattgcgttttaaccccagagattcagaggactgcatgggatcattgccttttccttttgactcctgatacatcatgcctaatatgagtgatgtataattagagagtccttggctttcaagctcttcttccaccaggggtttgtaatcggttaaacgttccaaaacaatcgttttcgtatcgatcggaagttttttgattaaatcccggttgaaaaaaagcaggaccaataaaaaagaggcgatgacaaagacaaaaatcatcataaaacccgcagcagcgaaacagccttttctctttttcttcactgtgtttcaccctcaatgtttggagcagtatgaccttttttattatgacataagacggtatatcagaccaagtaaaaacctgatttgaaacataaatttaaactatgagattgaaatggaatacaagcaggctggtttgcactcaagcgcatttgttataagataaaactatgaataaagaaaggtgatacatatgactgaatttagagaaacggaacaatcggctgctgatctggacgaggagacgctgtttctagtcgcgcaaacattcaaagcgctttctgatcctacccgaatcagaattctccatttattgtcccagggtgagcatgcagtaaacggaattgcagaaaagctgaatttactgcaatccactgtgtcccaccagcttagatttttgaaaaatcttcggcttgtcaaatcgcgcagagaaggaacatcgatttattactctccggaggatgaacatgttttagatgttcttcagcaaatgatccatcatacgcagcatgattgaaaaagacatccttgcttaactcgctgctagcgggcaaggatgtctttttctttattgtgtccgtgctgttcgaattcgtttctgctgagcttgatgacaaaagaagaaaaaccgatataataaacggctatcagaaaaaagactccaattgtcagagggtccgttccgattgactgaccgtaagatccaaggctgtttagatcaggcgaggtaagataaagctctgtcactcgatatagaaatcttgacaggaataaggttaggagaatcatttctacccaaatatgagtccgaaaatagatctttcctctgcgtttttcaaaagagatgtttttcttagcgaaaaagacaaggagccatccgccaagaatgcccaaaatgagatatccatataaaaaagggtgaatggcgctgaagattgaaaggccaaaagcaaacagcgagaaaagaatgatacgggtgaacagccagcggggcttcagcggctggtatccgatggaccttttaatttttttatacagaaaaaagatgatgatcatggcaggataaacgctctgaagtgtaagatgcatgatgtgaaatcccctccgttgagaagtgtatgcttatccggtcagaaatagtagctgaaataaatactgaacacaaaaaagaaggggaaacccctgttttcatagcatatgcaaggtgtattccgccgcatgatagatatgcccaagcgttatcaaaatgttatgattgtttttgttggaaaatacaagaagaaaaggtgcgcagaatgaaactggaacgtttgttagcgatggttgtgttattgatcagcaaaaaacaagtgcaggctgcagagcttgctgagctgtttgaagtatctgtcagaacaatttaccgtgatattgagacgatcaatagggctggtattccgattgtgacctcacagggttccgggggcggaattggcatcatggaaacgtatcggcttgaaagagagtggctgaaggaggaggaattgtttgcaattgcttccgctttgcaaagcgtttcatctatgtatgaaccaatttctcacagcacagcctatcaaaaaatcaaacaccttatacctgagcaatctgctcaagcatttaagcaccaaacagaaaaatggtttattgacatgacggcatggggccataccgaggatcaaaaggcgcttcgtgagaaaatcagcgccgccatcgatcggttgtcaacgatatcttttacatatacaagcgcaagcggggaaacacttcttcgtgaaactgaaccttatacattggtttgcaaggcggggcactggtatttatatgcctactgcctggtaagaaatgattttcgtttttttaaactaaaccggatgaaagatctggctatcttacatcagacctttatcagaaaagacattcagctggacactttgccatgggatagaaattggtaccagaagggccgtttaactgaattggttattcttgttcagccggcagcacgtcagcgtataggtgaatggttcggatatgatgtccttcactgtgaggaagatgaaatctgccgggcagtgatttcacttccagaagatcaatggctgatcggttttttgctccagttcggaaaggatattgaggttctgcagcctcttcatatacgggatagagtaaaagaaaccattcatcacatgcaaaaaatatatgaaacctgacacactgctgtcaggtttctttgtctataatcttaaaaaaaggaggagatcgtatgggcttttcacatataacacacttagaccggaaacgatttgccggactgtcacaacggacaagcaacgcactggaaatgacggaagaaaggaggattccggcactgtgggaccaattctggaagcaggatatgagcgctcttttatcacaggctgaaaaagacaagagcattattgccttatattcgaattatgaacaagagacgaatgggttttatacgttttcagtcggaacgtttcaggaatacgacgacattcttccgggaccatatgaaaacattgatttgccggcttccgcttacgccgttttcacttccagaatcggtcctattgaagagattgtgcttgaaacgtggaaggaaatttggacttgggataagcggcatctgcgcacgtttacaggtgattttgagatgtatgatcaaagtgccgcagtaccacagcgagcacaagttaacatttatgtagcgataaaaaaataataaactcttgaaaaactaatggtgttagttaataataaaactaacgccattagtttttgttaggagggtaaaaagatgagaattactcagtaccaaacggtttggcagctgactttttttccagcattgtttccggttaattgctatttagtagaggaagaaaacgaagtcacccttattgatgccgcactgccaggcagctataaagggattattcaagctgtgaatcagcttggaaaaccgcttcagcatattttactgactcatgcacatggggaccatgtcggatcactggatacattggcacaaacatttccgcatgcaaaggtcatgatctcggaacgggattcattcttgctccaaggtgacacatccttgcggcaagatgagccgcagacgcctataaaaggaggtattccgaaacacatacaaacaaagcctcaccaactgctgacgggcggtgaaacaattggttctctgcttgccattccaacaccgggccatacaccgggcagcatgtcatttcttgatacaagaaacggcactttaatagcaggagatgcgtttcagttgcgcggaggaatcgctgtatcaggtcagataaaatggacgtttccttttcccgccttcgccacatggaataaggaggaggccatcaaaagcgcacaattgctcgccgataaggcgccttcctgtctcgctgtcggacatggaaatttcctgagatcacccgcagagcggatgagacaggcaatccaaaaagcaaagaaaggatgatgagcatgtcaccaagaataggtttgacccaaaaaatgattatagacgctgcagcggagattgccgatcaggaaggggtaaatggtgtctcacttgcggcactttctaaaaaaatgaatgtgcgtcccccgtcattgtataaccatatcaacgggctgcaagcgatcagagcagaacttgctgttagaggactgacaaagctttttgatcaaatggcggactccgtaaccgaacgaaagggagattccgcgatgctttctttagcacatgcatatgttgattttgcaattgaaaatcccggatattatgaagcggctctgcttaaggttcaggacaaacggatggaaatcgtctctgaccaaattgtctgtcttgtgacgaagctgctcattgaaaacggctatgcaagtgaaaagactgccattcatgcgacaagggggctcagaagcctgctgcatggctttactgttttaatcgcaaaagaagcatttgaacgtgaggaggacattttagaaagcctgtcattttcaattcggacatttttgtcaggattattaataaataataaaaatattatgtaaacaaataaatggatgtcttatatttctgaatattgtataatatcaagggagtatacataggggagaggcattatgcaatggatgacattcacaagattgaacggttagcggcagcttcatggccggcttattttcaaaaaagcatagggcaatggcttctcagagcgaattttggcgtaaccaaaagggcaaatagcgtatggacttctgcggatatgcctgaagggaattttcaactagaggccgaacttttttatcaaagtttaggcttacctgtttgttttcatattagcaacgcatcaccgaaagggcttgatgacgctttggcagacagccgttatgaaaaggtagacgagtgcttccagatgacagcgttgtgccggtcaattatgagccgaacaaatgacaacagccgatttacatacaagtgggaacaagagccatcatctgtttggataggtgaatttattcaattggaagggttttcacccgagcgtcacaaaggttacaaacacattttcgaacgcatgccgccgtgtaaaacttttttcaagatgtatgacaaagaaagcctgacagcgcttggcacggtttctgtcattgatggttatggcggacttagtaatatcgttgtagctgaggagcacagaggaaaaggggcaggaacccaagtgatcagggtgttgactgaatgggcaaaaaacaacggagcggaacgcatgtttttacaagtgatgaaagacaatctggcggcagtttctttatatgaaaagatcggattttcgcctatatcggaacaccattaccggattaaaagatgaccaaaggaagggggttgctgatggattcgcttcaagagatgatttgcgaaaaacggacatacacacgcctttatcattcacataagcacgcatacagccaatttctttttccgcttgaagggagtattgatcttgagactgaagagcgccaggtgaaattaaagccagatcattttttatatattccgccggagtgtgagcatcgtttccgttctatcggaagaaatgaatgtcttgtactggatgttccgcttcatgcaatgaaaattgatgagtatcgtgcaggatcgggaattgaagctgcactcgatcctttctggtcttcgatcaggtacttgctgacagaggaagcaaaggccggaacagccaactcgcttcatatgctagtacaatacataaaagaaaagcttcaatcccatagctatgcctcaattgcatacattcacagccatttatttgagcggctgacgattaagaagctggcagaaatcgagcattatcacccagcttactattcaagctggttcaaaaaacagacagggaagcccccgcagaactatattgccgaccttcgccttgaggaagcaaaacgaatgctgatggagagaaatgaaactcttaccgtcgtgagcgaggcgctgggctttcaaaacctttcttcttttacaagatggttcacgaaaagcacaggaatgccgccccgcctgtatcgaaacaccttatattcagataaaaaataatggctatttggttaaacaaatcttgaatatctcctttacaataggagaaaaaggagttattgatatggcagttattgaagactttgagaaattggatatcagaacgggaacaattgtaaaagcggaagaatttcctgaagcaagagtaccggcaatcaagcttgtgatagattttgggactgaaatcggcataaaacaatcgagcgcacaaatcacgaagcgttacaagccggaaggtctcatcaacaagcaagtcatagcagtcgtgaactttccgccccgccgaatcgccggatttaaatcggaagtcttggtcctcggcggcatacccggccagggcgacgtcgtccttttgcagccggatcagcctgtcccaaacggcacaaaaatcggataacgcaaaaaaagacgtttgcctaaggcaaacgtcttttgcgtattgaggcgatgcaccacacgccacattcgtgtgtgccgtaaaggcatgtacatcggcttacacaattcagctcatcgctatatgaatatagcatggagggcgaaggaatgcaaggattactttgtttttgtgattgaatttgtccgtctaatcaagatcttattatatgaaatgtaataatcttttagtacagaaggtgagcatgatctaaggtaagcgattgacctcataagcaacacgtattccagattcaatcgcgccttgcatccacgcatgagtgagtgaggcgtgttctccggcgaaatgaattctgccctcagggacaggaatatagggatacagctctaattcttgtcctggttcgaaagctgtaaaacctcccgcagaatacgggtactggctccagctaaaagaagtgccagacacaaattcagaccacacaatatcaccatagatttcagataaattcagtaaagtatactggattcgctctccttctgaaagactgtcccatatcagtgcctcatcagcccaagtataactcgccagaatgacggcatgtccatttgctccaatatttctgcttggataatatgaaaaacgaatcggaagatcagtaatagatttgccgccgcgctgcccggctttttcccaaaatcggcttttaaactctatgccgatttttgttgcactgatatagtttagctcacggatggccctccgtttatagtaagagaatgaatggtatggttcgacttttacaaatcgcaatgttgaaaaaggaatggttacaatagcgagatcagctgtgaatgatgtgaattctgccgtttgttgatgctgacaatggatcgtaacacgattttcaccctgagaaattttcatcattttttgatggtatagaatgtttgtttttaattgaggaagaaacgcgtgaggcagcagatccataccgccagttatctcatagaagtgagcgggcgatgaaaaaaagatagattcccgcaatacttcaacaagggacatccccatatacgcttccatatccaaaagtacaccgatcatatcgatcgcgccatatgaaaaatacgtgtttaaaaaagagcttaacgaataatttttgtattgttcttcgacaatccgccaatttctcgctggattttgattgataaaatttagaataggctgcagtaaagaaagcaacagctcttcagacgttttcccttgttcatttggtgcaactggatatctcaatattccaggagctcgttcaaaaacttggagacgtgttttgattccatttgcataaatgatgtccatcggggttctattgataaatacatttgttggcaatttgaattttttgatatattctaaggttaacgaatggttattcggtatgcgcatcgggccagcgttgaaatacaaatcatcactaaagggagatctcaaagtgcagacacggccgcccgctctgccgctcgcttcgagaatcgttactctgtgaccggcatttttcaacaaagatgctgatacaagcccggacaatccagctcctataacaagaatgtgctttggatgctgcgatgcgcttaggccatttctaatgatctttaccatgtcatcattcattatagaattcaatttttggaggcacctctttttagaatttattgcattatattcactgaaaagagcgcctatcacgatctgttcacatcttttggaatttgaaaggttattgttaaaaggaaataaaggggtgatgtatgtgactaactttgttcataagacggtaaatggcttgaaaagtcttttagatgaaaaaggagccattcaattgttttgttctgaaggggatatcatggagttccttgttacattttcacaggacaaagcaaccctgaatgacattcaaagctttgaagctaaacatcagattacccttccagaagattatcagaagttcatgacactgcataacggcgcgaaaatttttgagattctttctgatggggagaatataggtggaggacttcagctatttagccttgaagaggttgaagatgagttaaaatatgaggatttgtttgaagatatcaatggtattccaattggctacttattggaagaatgccatttaatgatcgataaagataaagtgaacgaaggtgatcccaactatctctatatatttgaaagtggtttagaatataatgcattaaatgtaaactttgaaatatttttagaccggtatatattggccaatggagaacctttttgggattggcgctactataccgcagaaaattattatagaacaagatagtttgtgatgtataagacagtcattttggctgtctttttctgttattcaaatagattactgtggtaaaatttacatagagtagtctaggaaggagaatgatatgaaggtatttgaggctgattcattactttttgaggccgataaaagaaccaaagagtataagggactaaggtcgcaaatggtgaagctaagaaaagcttttcaaaacgtagctaacctagatgacagtgagttttcaggcaagggtgctgacaacattaaagcattttatcatgatcatgtcggtgttactgatcaatggattgatttaattgacatgaagattgctttcttaagcagcatgtctgcaaaacttgaagatgcgaagatgtctgatgcttacatagaagaatcctttctagaacacgagttggctaacgcttatgcaaaatcaaaatccattatgtctgaacagaaaaaagcaatgaaagacatattaaacaacatcaatgatatccttccccttgaaatattctcaacagaagacttcaaagacaaactttcttctgcagatgacaaacgtgaaaaaacaatcgataagctaaacaagcttgatgaggatttaaaaacagaatacgctgaaacagaaccaaacgaacaatttattcagcaagactttaaaaagctgcaggaatcaacaggcaaaggaaaaaacgctacaccaattcactataacgctaaagcgtacagagaaagtgacatacataagaaaaaaggcgatattgaaaagcattctgaagcttacttaagtgtgaagaaagaagaagcaaaggaacgtgaaatcaaggaattaaagaaaaaacttaatgacggtgtatctgaccctgatgaatatttagagattgctaagaaagtagggtacgagaatctggagccaactcaagtgcagcttgcagtgcaaattgaacaagcgaagcagctagaaggagcaggagaaatcacctgggatatcgtaaaaggtgtcggagtaggcttatatgatgttggcaaagacactgtaactggcatatgggatttcatcaccgatccgggagaaacactctcagcactggggaatgcagttattcatccagtgaaaacttacgatgccatttcagcagcaatagaagagtcatatcaaaaggatatggtgaatggagatgcctattctagatcaagatgggttacctatgctattggttcagtggctgtagctgttgttggtacaaaaggtgcaggagccattaacaaagcagatgcagcggggaaggtcataaacaaagcaagtcaggcagggaagaaaattaaggacgtcaagattccagatttgctgccttataatcctaagtacgactttcctctagccgataatgtgccatacaatgtggttgatagccaaagccttaagaatgaacttttgactaatgcgaagaaaataccggatggaacaagaaaaccgtttactggccaaaagataagccccccttggctaaataaagaaaagtatgatgcatatgaaatagaggggaaggtaaaggcgaaggggaaagttaaagatgtaagccgaagagtgtatactatgaaagatattgatattaatcaaaaaacagaattcggtgttacaaatcttcagctaatgaaaaacgggaatgccccttatgcagaagatggtacacagattaatttacatcacttgatacaagaagaacctggcccaatgcttgaaatccctaacagcttacatacaaaatatagtgatgtcattcatcagcttaagtctgatggtgaaagttttagaaatgataaggttttaaaagcacaatacgagagctttagaaagagatattggaagtggagagcgaaacaatttgagaatgagaattgaggtgtttaaatgatttattcgaaggttgagaattttattaatgaaaataaacaaaatgctatatttacagaaggcgcaagtcatgaaaacattggtcgcattgaagaaaacctccaatgcgatcttcccaacagttataaatggtttttagaaaaatacggtgctggtggtttattcggtgttttagttttaggctacaactttgatcatgcatcagttgtaaatagaactaacgaatataaagaacactatggccttattgatggacttgtggttattgaagatgttgattactttgcttactgtctagatacgaataaaataaaagacggagaatgtccagtagttgaatgggatagggtaattggttatcaagatactgttgcagaaagctttattgaatttttttataataagattcaggaagcgaaagatgattgggaagaggatgaagactgggacgattaagcaaaagtattgcaattgatgattaagctcttgctaagggacttttcttcgattacgagtttggcgtagtaataaagattaggggcagttttatgtgggtaaatttattagaggaaattcgaaaaactgaagcaaagtatggagatgaattaaattctactgttacagaccaagaaataagaaattttgaagaagcagtattaggaaagttccttgtaaaagagattcctttagaatataaaaaattccttcaaactgtaaacggattagattttaatggcttggtaatctatggattggatcaagaattactgagaaaagaaaatgatgaagaagtttatggttttattgaaacaaatgaacagtggcacgaaaatgatgagcagaaaaaatatctgttttttggtgactcagatacagcttggtattgtttagatgtaattgagaatgaatacttagagcttgataaaccctctggaacactgatgaacaaatttaatgattttaacgccatgctagctgatgcattgaaaattagtttagacaattaaacaaaagtattgcaattgttcattgctaaagatgtgcaatgcggaggggattaatatgagcttcaataatgtcaaacaaaagttgaaagagtttttaattgatgcaaaaacagatcccagaatcaataaaaatgaacaactcaaagaaattgaaatgaacataggaaaacaattaccttctgattataaggactttttgaaggaatatggcggctgttatttagaaagtaaaaaaacatcagatgagattgagtatgacgtttgctataaacctatagagaaagatccttggatgggcaagggcgataatacacaattgttagaaggtttttatggtttagcgaacgatcatgacagtcttcagaaagcaatcgatacatattctgatcgctttcctagaaatattattcctatcgcaagctctgcaggcgggaatgaaatatgcatggatatcgataatggaaagatattgttttgggatcatgaattaagtcaccccgacaaagactttttcttaattgccaattcgtttgaggagtttgtcttcagtttagttgatgaaccaattgaagctgataaagaagatgatggaattctgtatattgaattagatgatgacttactaagcagttaagaaagcgtatggaaataactggaggaaaagttaaaatggcagttagttattggacaggggagaatcttacactgcgagcaattcaacctgaagatatcgttatatttgattcgttagatgatgaaattctgcgaaatatggacttgctacattttcctcgttcagctaataacatgagagaatgggtagaagaacaattagaaaaagatgaattccgttttattgcagttgatagtgataaataatatagtaggtataattgaaacctttgactgtgataggaaaaatagtaccttcggttattatttggctgtattcgagccatataggggaaaaggatttgccaaagaaatgatcttgatggttcttcgctttttctttttggaacttgcttatcaaaaagtaaatacaactgtttattcttttaataatccatccatacgattacatgaaaaattaggtttcatgaaagagggacaactaagaaagatcattttcactaaaggtgcttattatgatggtttttgctttggaatgacaagagaagaatttgaactgaatcatggataatatcacttgtgcatcgataaagtactggattccaataaaataatggttttatccataaagcaaaagttttgcaaattatttcattggtttcatttaatgtgctataattagaactgtaagacatttgattggttatagcgtatttctttaatgagaaatacataaaataaaaaagaccgaggtgctaccaacaccccggctatgtacaaaaagctgtccatcaaagggcttgctcgatgtggtttctaggtagacctatcccttcaggttctgaggctcaagggaggtctattttttatttatataagtcaacagggcaattataaacgacccgaatgcaagcattagcattaatacctggaatgttgacatagcatcaccccctttcgttaggggatgagcaagactctcttgagtgagcaatcttaatgaacaggaaatattatactatacataaatccccttctcgttaaaaattcaatatattaacaacgtgaaaagaatttgcaaaatgcaggttcttttttatattcagttattaaatcatttgagtgattgtcgatatttaacatgtgtaaaaatggaaaaggtgatacaattataaaaagttctgagaggattgtgattatcggtggtaaatgtaaactcaagcgatcttatttatgatccaaaattcttagcattttgcagcttggctacagaaggatatgggggaaataactcagctcctagtagatccattggttttagtgaattctgtgaaaaacttgagaaaaatgaaatagttaaacctgagaacaaaaaaagctcacttgacctaaataagtctttagattattggaaatcaaggtttaatccaggcggtaatctttcggcgttagattctcaggtattagatattatcaaaaaagcttacaacttaggaatggttaacaaagataatatgctgttgcgaaacgaagcagttaatgcgtataaaaattcaatttaaatatgagacagagcccagcttaataaagtgctgggcgttttacttattagagttattttctcgcaaatactttttatgttctttctccaatttacaatatcatctttgaatatataaattttatatttttcctttgcttcacttttggtatgatccatgcaattgtaattgccggatctgtttgaccaatttgcacactaaataaaccaaattcatcccgaatactaccgattacttccaaaggggactttttatttgcttcggttaaagttatacctgacataatcaaaacaggaactaaaatcaaaaattcaattaacctcttcttcatttaccatcaccgtctccctcgtcgaaaagaatctctcctttattaatactacgtaaatcattattgacctttatattttattaccaacatttgttctgttaatattagatcaataaaggaggatatgcttagagattgaggaacaatcgactggacatcaatgatgctcccagaacatttaacacagcttaaacaagatttgattgatgtatcaaaaattgaaaagccatctttggatgatcaacaaattgaagagatggatcttctcgtctctgaggcacttgaatttaataaagagttgaaatttaaactttttcataatggattcgttgaaaatgtcaccggcagagtccattacataaattttgaacaacaaaagcttcacgtaaaagaccagaacgacaatacagtttatatcaacatgaataacatcataggagttacatacaatgattgattactcacaatttccacgaaagaatatactttgtgtcgatatgaaatcgttttatgcttctgtatcggctgtaacaatggggcttaaccctttaacatgctaccttgcagttgtaggaaatacggagagacagggaagtgtagtgttagctgcatctcctgcacttaaaaaagattttggaatcaaaacaggatcgagattgttcgagatacctgaagatccaagaatacacattgtaaatccacaaatgaagcttttcatcagagtttcaactgagattacaaagctgttttacagatttgttcctgaaaaatgtgtccatacgtattcaattgatgaatcttttttagatgcaggaaaagaaaatcctgaagaaatggccaaagcaattcaaagtagtatgcggagagagtttggcctgatctgtacagttggaattggtgacaatatgttgcttagtaagcttgcacttgacctggagagtaagaaaacgaaaagtggcattgcacgttggagatatgaagatgtgccaaataaactctggaaggttcacccgttgtctaaaatgtgggggataggagggaggatggaaagaaatctgaatcggatgggaatatcaactgtaggtcagttagctaaatttcctttagagctgcttgaaaagaagttcggaataatgggaaaccagttgtattatcatgctcatggaatcgatttatcagaaataggagctcctttgatgcaagggcagattagttttggtaagagtcagattttactgagggattatataaggagagaagagattaaggctgttcttttggaaatttgcgaggaagtcgcaagaagggcacgtacacacaacaaagctggtcgaacaatcagcctgggtatttgatacagtaaagatgatcttggtggtggattttcaccgagccaaaacaatagatcttcccacaaatatcacgatggacatatatagatgttgcttgatgctctttaataagttttactcggggaagacggtgcgaagtatctcagttacgttaacgaatattgaggatgatgttaatcagcagttaagtttatttgaagtaaataatgaaaagagaaggagactcgggtttgtgatggatggaattagaaacaaatacggatcgaaagcgattctaagagcagtttcttatacaccagcagggacagcacttcacagagctgggctaacaggagggcacaaatcatagcaaaaaagagatatcagactcattaagtttagatattataaaaaattctaaaaaatcaattaattggtattgaaaaagaaagaagaaatgttataattatgaaaaaaggggtgtggtattctacataaatatgaaaaataattttcttaaatttattttatcttttaacttttcaactttatccgatactctgtatatagtagttgcaacaacttatatttatttcttaacagattcgttaacacttgcctctttgcctgtcgtacttgcaatgatagcctttagtggaggcagcttttttgttggatggtttttgtctttaacatcaaatttaaaaaaactatatttaataagcagtattataaagctagttcttctcttaatgttttttatagttctatatataaataacttaagtttatacttcttggtaattacattaattccattcactagtggcatcaatcaatccttaaattattcaattatcccgattgttgaagatgataatgttaaaggtaatagtactttaactattacaaggaatcttatcaatctaattgcatggtctagtggtggtatgttagtttccctacttaattataactacgtaacaatcatatctataattcttctattactctctattataatatttagcacccttgataaaaataaattataccttgccaattatcaaccaaaaaagcaaaagaaaaattcaaaaagtatactaaagctaattttgaaaaataaaaagttgaagatgctttttatttctgaagtgttttttcttttaggagggggaatttggacaagctctttcatacttgcatatgtaatcaatgttttacatcgaaatgaggtttggtggggttatttaacagcaacgtttttatgcggatcaatcattggcggattagttgtattaaggttaaataacttcttgaaaaaaaggttgcttttttccttattaatagcttctatattctattcagttgtggttttaggctatattttgaattctagcttttttattgctgcacttctgtttcttctgtttggtgtaccaaccaatttaaaagaagtggcacaagttactattatacaaaataatgctgggaatactgagaataaggtaaaattattttctttgtataatgtaatggatagtgttatacatgccggatccattgtaatactgggaagaattgctgatttgtatggtatagtttcatcgtttggactttcatttgttttatgttcggtaggcttgttgattatgttaatttactatccgaaaattaatttagatgaccacgaaaaatcaactacaaattatacaatttaggagtgatttaattgagaagtagaacaagtgaaatcataaaatcatcatatccaactgtgaatgatattaataaaatgtcgtatgtcgagtttttagcatttttaaaccaacctaatattccaccaggcggctttccttctattaaaaaagcagttgaacaatgtaattttgaaccaggttcactccttctagatgctggttgcaatactggttttgttacacatgaattggctcgtttaacagggagcaaagtgattggtttagatattagtcatgaaatgattagcactgctaaagaatatgcaaagttaaaagatatctcctacccaggactcacgacttttatgcaaggtgatgctacgaatttagttttccctgatgatttatttgatggagttttatgtggaggatcaactgcttttatggaaaatcctaaacaagcaattaaagaatatgctcgagtagttagaccatggggatacatagttgaaatagaattttattataaagaaaaaccgcagccagaacttttaaacagggttaacagtaccctaggtacaaatatgaaggccttcagcaaagcagattggattcaagcgtttgaagatcaggataaccttcaacaagtatatttctatgatggtgagttacaacatgccgacgaatcaacaattgaacaatatgtagaacaagaagtagagagttttgaaataccacaagaattaaagggtgtggttaaagataagtggcttgagttatatcaggtactatttgaaaatcggaaacttctaaattattgtattttgatatatagaaaagttactaaaggtgcttggtggtaataatatgacaaattgcgaaaaacctgtaattgattacaagaaaatatatattcttaaagagagtactatgataactaaaattactgagaactctttatgtatttgcaatagaggaagtgaggaagttgaaattgaaggagatccagatttaatattagacttttttgatttcctgaaaaaatcaatcccgcttaatattatttgtgcatttatgaatcgagatcataatatagatcaagaggattgcctagaggttgcgaaaatcttatatgaaaatagtttgcttgaaaaaaaagaaatttcggaagaaaattaccaacataaaaaaataaaaaaacgatatagtagacaacaaagctatttttcattgtttaataatgattatgatcaaagttttatacaaatgaagaatttaatgaaagctcatgtaacactaatcggaatgggagggattggatctccagttgcagatttactagttagagccggtattaaaaatatacgttgtgtagatggagatattgtcgagttaagtaatttaaacagacaaactctctatagtgaaaaagacatcggtagattaaaggttgaggtcgcaaaggaaagactccaaacaattgataatgaagtaaaagttgaatgtgtaaacgaaacaattcattcggtagagcaagcaaaacaagtaattaataattctgattttgttgttgtgtctgctgacagtcctgtaggtaaactgcctatgtggattaatgaagcatgtgtatcaaaaaatgtccctgttatctttactggttactcaggcgatatcggcgtagttggaccattgattattccaagaaaaactctatgcttaaattgtgatgagcactttagcacaagagttgactcctcaatttcaaacaacgttagagaaaaagtaaattactttgataataaaataactcctccatcaattggtcccatttgtttcttagtctcttcaattgttgctcatgaaataattaaagcgcttgcgcaattaactataacacctatcactattaataaagttttaaatatcgatactcgtagccttaagattgatttccatgagattgaaaatgctaaaaatcagtgtacttgttacaaaataactacaaataattaacatgaaagggggtgaatgttaatgaaagttaaaaaaattaaaaagaagaaacctattaaaattggatttgatggtcccgtaatgaattaattctaagggcgagtctttataaggctcgctctcattattatttaaaaggatgtataaaaacaacattttaggaagtggttaatatgtcaattgaaattgaagatattaattatttatataatatattatatgaaataatgccacgtagaacatctaatgaagtcttgtctatggattatttaactttctcagcgtacattggtgatcctaacgtagcgcccggaggatggattactataaaaaaattagtcgataattcaaacattaattctaaatcaaatattttagatataggttcaaatactggacattcaagttttttgttgaagatgctcacagatgcaaaagtgacagggattgatatcagaaatgatcttgttgaaataagcaagaaaatctgtgattatgtggatctaaatgtggattttatttgtggtgatattaaggatatgccatttgaaaataaagaatttactcatataataactactggtacattggcatttttatcgaacgggcatcaaaaggcattagaagaaatgcatagagtactggtcaataatggggtggttattgacacatgtttatattataaaattaaaccgcctgaggatgttattaagagagcatctcaaaaacttgaatctgaactattgaattatgacttaaatcaatacaaagaattatatgaaagatgcggattcaaattatttaatcaggtttcaatgtcagaagactatagtgatgcagatattaacaaagttattgaccacatactttatagggaagaaatattatgcagagaagaaaatatgccaattggggaagattataaactagccttgaaaaacagattaacagaaacgttaacagtatttaaagaaaatgaaaattatttatctggagaaatactatttttccaaaaaaatgactaagcgagctgtttgctcgcttgattcatgttgtttttatcatactaaatacaactaaatcttgtgactttccgtttaaatattctgaattccgaagtactccttctttttcaaagcctaacgcaataggtatttgaatactttttgtgttttctggattacaccttatttctattctgttcaactttaatttgctaaaagcgtagtcaattaaaaattcaaggcaattggtaactattcccttgccctggctttgttcttctatccaataccctatacttgttttcctattgtcaaaatcaatttcatgtaaacttatcatcccaacaattttctcattgtataaaattcctaagttcaaactttctttctcaatatattcctttgcccaagatctaataatgccatcataaacagttttcttttgaacagaatctacccatggtagccatttcttcaaatagcttctgttattatcaactaatctaaataaagtatctctatcatctaaatctaacaactttaattttactttattattaacgttaacagtaaacatcttatcacctctgatcaagtgttgaattacatagggaaagttcatataaatttaaattgtaaaaggttcttataaaaacacaaagttagtgaacacacttacaagatggttttactgagcatgaagagtgaatttttttatctcactcttcatgcaattacactttaagtttcggctctttcagcaaccttatacgtatcgttttgttgttggagataggaagcacccactgttccggcaacaccgaataatagaactgtgcagataattagttttgttttcatattgcttctccccttttaatttgtcttctcgcttcatttgccaaacgataaaattcaactgcaccccaagcttctttttttgctgtgagaaaatcagctacaataactccatagctttctatatcagggtacatacctctttctctgaagaactggaatgcttctctcactaaatttaaatctgagtacaagaaaagacctttaaccattttcagcttttcaattactacttcattgttgtactgttctgctatctgctttgattgttcataaaacgcttgagaatttttagtatcgttttgccttccttttaagaaggagataacaaacaatgttttagctgcataatcatggttttctggctcaatgatttggagcgacttattaaagtaaaaaaatgctttatcaagttcttccatttgattataacataatccaatattaaacagtgctgaacgtatcaaatgtccacgattcttctcatttttattcagttcttctgcttcttggtaagctttatatgctctttttaacgcctcatcaaacttcatgctgtccagtaaattgccgaatatgacgaattgacaacgtactttttgtaccccgtatgtagagtttccatcgacatcaggttgttttttaaaaatattataagctctcatagcataattcattgaaaaataagtctgtttcatgtggtaatacacttctgacaatttaaaataaaattcagctttttccacttcaatttcttcgctatcgattgagtccaaatatttctctgcttgtctatagtgattaagagagaatgttaattctttttgtctaaaatagaacatgcccatgaaaaaataatagtaatattcgagcattccggttaagttttcatgaccttcatattcttttaactcaccataatttttctcaatgtcctttatggcgttagggtacatatacgatagcattaatttatgtctaaattcgagtagagagtagtatagcaagacatcttgattttcttccataatcttcatttcttgcataacttcttttcgcatttcctcagctctaccgacccaattctttttaattgccacataccaatgattcatttttgtcgctactaagtcatagggaatgactttttcagtcttcaagtttcaaacccctttctgtcctttttattatatagttgcactggaggaaagaaatgtaaagggatttgtatgaaaattacaaataaattgattgtatgcgtgaaacttcaaaaaacgaaaaaaataccctcctcgattaagagaagggtaggggttttatctcggtgaatcataatccattgcttgttaactatcagaaataccttgagttgttgggtcaacaatgatacccattgcagttaaaaaagttagaagcgcattaaatttctcagtcaaattgtcaccaaatacagttaagtcatatatcgtacacgaataacatgcttatcgtaaaaatttataatgagctaaaaaagacagtaaacataaggatttttgatactttaattagtgaatagggggtaaacgatcgtaaaacataagcaggagtaggggaaaggggttgttttaaggagatattgatgagaaagggaaaattttcagaaggaaaaacgttgataatataggcttttacgatagcgattacgatgtgaaaaaggacgattttatgcgatattaggaaaatgtaaatttggggagggtgtggaaatagaggtgctatgggcacttttgttcttgtttttgagtatttggatgttaatataccccctatatattggtagttaaatccctatataatagctcttatacctgcatttcagttacatataatggttatgctcgaatgctttatggatgcatatataaaagtgaaaatcaagaatgtttttaaaaaaagcagaataatttctggcttgaaatgggatagataactctgtttttgatcgttatcgtaacaggaaaaattaatacgaacacttattatagccttaataagcaaaatgctctgagtgaagtactacatatattcaatcttgtctttttaatggaaatggagcatccatcgtttttttatttggccatattttgatcccttaatgatctcgactgattaatccttatatgcaatataagatttggccaagtaattgttattactcagcggtaacagaagagaaggaatttgggaaagcatttgatttcatacataagagaccacaaggcaaagagttaagactctttaccatgaggtgttttccttaaccaattcgcaataagtttcattaaatttactgcaatagataccaaaacaatgatcaaagcgatctcaagtaagatgataagtccaatatttaagtcaagcctatcaaagtaatcaccgctaaaggaaatgagttgataaatacctagcattagagctataaagattgctcctaaaacaattagagattttttagagaaatccttagcatgttcaaaattataaattattagaaatacaaatagacaagccatagcaatctcatgagtcaacgaaccgcttgctgaaaatccttgcacaattaaggaagcaattaatccaattattccgattatttttttcaaggtatcaccttctttgtatgatcctaggtgccagattaccaattaaaggggaatttatcaagacatttactttaaagttaacttaaaatcgagattttaaacagataggaggaaatgaatgaatcaagatattcagtttttaaaagaacttcagcaagagttgaaatatcaagacagcgagggtcaagcttcaccgcgtttctggacggtgggtgactatgagtgggtggaagctcgcgaagaaaatgcagaacggtattctgtatacctgccagcgggtatgatacaacgtttgctgacaagtggctttcgaaagcttggtttctcggccagtgtcggcacgagcattaatcatattgtagccgatcttttcatctttagcccaaggagggataaggccccatctaagcttgcccagacggttattggatccatcgttaatgattgtcaggatgttttgtgaaggagcgacattatagtttgggtgatattcaccttcaggtaagaattgatctatgttgaattgcttgatgatgtcattgtacaagcttgatacacgaaaaacaaaaaggagggatgtgatgcagcaaacagttgaggttaaagaagttgaagtgttggtcaggggaatatggagaaagaataatcaatgatattaatacttaaacagtcttctgatagtctttacaataataagaaagcccccataccgggggcttgaagcggcctaataaccattaaatcccttgatttcaaagttttctgtatcgagatttaggctattcaattgctttaacaaaacctcaaattttaagcagtcaccgtttcttaattcttctggaatatcttcaggatttgcaattttcattccattctcaatccactgttttcggtataactgaattgcagcgtcaattaaataatctggagttacaataaaacctaagcttacgtcatgatcttcactgtagccgtattcaaaatcgcaacaagggcagatttcaaatgttttttgatactcaccatcattgtttaatgggttttcacttaatcctttatatccgcaaattaaacatgtatataatttagtcatagcaatccctctttaatatatttatagttcctattgatttttataataattataactaaaaatgttgggggggtgtgcaagcgggcaaaaaatgaccttttctcatgaagcttttattatattaaaactatattaaagaaactatgaagtggctagcatccgcaatggtcggaagagggaaaggaaaaaaggacattaagttttgaataaaacagcagtttaaagagaagggaggttaactaagcctgaagaaatattggataaccttcaattctcagaccgtggggaaggtcacgaaacttgtgtgtttactgtaatattgattttatccaggatataacagggaacattgaattataaatagaaaggagagattaaattttcctcaaaatagacattcgtccttttgttttattctgtttcttgattacggataccccttttactttgctataatacaactcaaaggttgtagatacaaattatcgatagtggtgtattaacagggggaatgaatatggtaaacaaagtattacgcaaaatagacggagcaacaatcttctttgtcttggttttaacttttgatctaactgttttcttattgtcttttgatgattattacttaagctttgttgtacaaacaaattatattttccctatactacttactttagccggtttttttgtgttagcttggaggtttaaaattcgacaattatatgtaacttgcataacaattccactgatactttcagttgcatggtttgcgttaactggtgattcatacgataccatttcttcgccaactaaaaatgtaacaataactatagaacataataatgccaccttaggggaaatgaatcatttttacgatttttatgttcatgttcctagtttataccctggtttaatgaaaaaagtgaataaggacaccatacgtattatgactcgaaatatcgaggataaagacgaccttagtgtattaggagtaggtaatgtcgaatggataaataacaaaataattttccattcagcatatgaaaaggcaattgaggttgatttacagtattagtctaagttgaagcaatcttttttgtgtaatatttgtataataaaggaaatcttgatactcttaaactttaaatatgataattctatatttaaattacatgcagcgtttactactaatttggatctttaaactgattatgatatccagatggatttgctcatgatgagtaaatcgatactcaaaacagctggctttaaaatttcttaatccaggatacatacattagagatgaagataacaactcagtttattgccgttattgctttggagaaactaagtaaatatttgtcataagaaattctgatctatatttggctcttatttgggaggaaagtatgtcaattttaacaataattgaaatcgtgttagtggcaactatattaggattatttgctttgacatttaaaaaagaaaaaaatgctgatgaagatgtgtttaattatgccagatatatgatttatttgcttgtagctgaagttgcaatgtttgtgatatttcaaataatttaagttaaaacatggattttaaagtgattttaaggaggcgtctagacaatgttgaagaagcttttaacatgaaaggggttataaacatgcaacttttaaggatctttattgttcatgtcttgtctgcgttatcagctgctgttgtttatgttttgggcattgattatgatggttatattccgtacttcttaataagtgttattctctttatcttctatttaatctttgctgcacctgttcaatatttcttgaatcgcaatccaaaaaggtttagcctgaactatttgcttacatacatattcttttcctttttagtgtggttaatctttgctataactactgacccaaaaaccacaatagactttctaatgggatatgaaatttacttatttagcatttcatttgctgtaatcttttggatctgggattcagtttttctgcaaaacaaggcaaagaaagcagctaagtaagaacgtcataaaatttcttccttattaagaaaaaagactgtcctttaattaccaatttatattatgattggaataaaagggggagagggaatgaaaaaattaatcgttctgactatgatttgccttggctttatgtcgagttttagtattccaaatgccgaggcaaagcttacattagagtacaaaaatgttaactttcacatgagtgaggattcagaaagtttttctatggcagattattttgatcgtgattatgaccgtacttggctattttacaaattcacaattcgcaatgctgaaggttgtactctaaatatgaaaatcagcagaattactcttgctggctgggtattcccacgtagtgagaaagaatttaccggaaattatttagattatactgctacagaccgagtagagggagatgctaatcgtaatcacgtgttagagattacaaagaatccaggttgtggagatgtttggataaacggtatttatggattcgaacatgaagagcctgatgagtattaaattcagcgaggccaaggagaaaaaagccttggccattattatttagttaatgatcattttaagtgatcagaaataactaagaggtgagaacgtgattaaatcaaatttaaagcccttattagacgaaaggaagatcagcatcaggcagctatccagagaaattaatcatgagtatccgactgtcagaaagctatacagagatgaaatggagcggtatccaagagagctgttagataaagtctgtacatatttaaacatcgagctgcatgagttattgattttccaaaaagtcagaaccatatcgaatactcaggatgaaaatggtatactaaagttataaggttaggaaagaattacaagttttctaggtctaaataaaatcgtacttttatccaaaagggtattttgttatttaaataaaatgatttgttgtttcataattgttatctaaaaggaaaaagattcgattaaccgaaagtgagaatgtgtgaatgaatttaatggggtatatggaggaaaggtttccaagactcgaattaattcctagcatctataatcagtggagcataggaatccatttctatctcgggggaaatatttaccaactcaaagagaatgaagaattgaatcttaagagatttcggtttgtatatgagcaaatctcaaccattttcaatcaattatttgaacaaaacgatgacatattccttgtgacgaatatgtataagcacaaaaccaatgacaaatttataaaaaaattgaaggtgtaccaaccgtttctaaagtgtaaaaattatttaaatcaaattcaagtaaagacatattcctacccgtttgagatagatgaagctgaagaatacgagatgcaacaattttccttgttatgcaaacctcgagacttacatgtagctgaactacttaaagcagccagtaatgaagattttccattgaaaccgagattcgggggttactctattgattaccctgatgttttctttgtgaacattacaaaagacattattttctttatctatgatgaccgaggatgtgaagtcatagctcttgatttcaaacgaatacgtccacttaatgaaaaatatcacaactgggtagaagaatataaatacatataaatacatataatactctttctaaaacgatttataccaggaaaggcagaattagattatgagggcactacatacaagatttaaacggttattgaaactaagaaacttagaattttttcagttggtcttaagtgatgatgagagatctgcatttttattagtagttgataaaagattagtggattttgattctcaaggcggaaaccatattagtgtttatttagttactcactttgagttatctgatcaatcatataaagatgtactaagctttaatgatgatcttttggatatgaagcataattgttcgtattcaatggatattctaagcgttaaagaggaatttgatttcgattttccatttgatatgcttgcaattaaaagatatgtacaagaattaataaatatgttagcgattaatctaactttacctgaaatgaaagaaagagattttgacaaactttctcaagactaaataaaactacgattttaaagagaagcagggggcaataatgttaaaaatgattactgtttggtataagtattacgatgataatgaccctaagttaaaccatattgaagacggctggtcaaagaatgagtacccaaaaccaattaaatcatcgtttgcaaatcaagaggcttggagaaaaagcgagtgggagagaaaatatgcatatcttgatgaaaaatctagagtagttgatgcgactaaggctatttggcttaagtaaagttttgtattaataaggttttttgaagacaggaggatagacttttgctacctaatagattgttaaacagttatgtttatactctaattatctctagtttatcatttggtttaatctttggtctgtatatgtttgcttactctggttttatggcattcgcattagtcactattggcatcataggagtttatgctttaatcacttacttggtatttgctgtccctttgcaagtgtggcttagaagaaggcccagaaaattcagtttgaacaattttttaatttatattgcagtagcctagctgtgtttttgttctggactgttgattatccgccaaatgctcttactgtattcagaagcttaaattattacattatgagtattgttgcaggtcttatttattggttttgggactccatattcctacgaaattaacacattaaattaaattatgaatttcacaccgtttacaacaagtaagaaggctgctgatccaaacagtaaatatccggacagtttttgtttgcttaatatcgcttcaactccgactaatgataaaagggcggcaacaaataattgcacaacaatcaacaataattcattttgattgaacaatgagtatacgcacaagactaatgcaatgcaagaaaccgaaatttttgcaacttttagcaaggtatcactccttatgcggtcatgaattaaccttaacacgattacgcgtcttaatccgagagcataaagaatcaagataaaagaagtgttttaaacaaaaagcgcattaaactaaatgctctttttcataccgcatcgccgacattcacgcaagaatattccactcttcacagagcttttgaacaaagtgtaatcacaattgtcgcagcggccatattttacatcaggatactctttgtaatcataaacgattgaagtgtcatatccattagtttcgtatttctcttccacaagatcacctacataatttattcacatactcaagaataccaaatttcgttcgatatagggagggaacaaatgattggattaggttattttttaataatctggcttggagttggattattgactggcattaagtttatttttgttgatcaggtctatgatgaagagtttaaagaactcatggataaagaaacagcagcgggcatggaaaggaatttggccagcctgtttttcaaagataagcttaatgttattgcttttttcatgttaattggtttgctgccattagtaatgaggattacaaaattatttaaaagaggttgatttatgcctttgcttgattatttttatgtactgcagtttgaaaacaaggaatacttcaaatcatttaagttagatgaggacggttatttaacatctagcgacctccacggcgcttctaaattgcaaacaatgtatgaagtcattgaggtagccagtgaactcaaaacaaagtgcaatgtgcaatgtgcaatgtgaggtaagggaaatccaagtcgtaaagcgttaggagtgttcaggtgtattggatagagtggattgaaaatggagaaaagaaaagcattgttgcagaaggttggattgaaggggctgttatacttgaagacttgtatcagaagcggtttgattatgttgaatggaagcggctttgaaaaggggtgaaatgcaattaaaaatttagttttattgtccagctttttaggaattgtgctatcaattatagggcaattatttggagtcctaacagatttctttattccaggtattgcaaggcttatgggggttttagctggcctcctagtattactttgcttgaagtccagaaacacagaaatgcagacatttatagtgagctcaagtactgcattaggaataataggtgcaggagttttatatcttccagcggctattgtcaatatcttaattgggttcaaactaaacaaaaagttaaaagaagaaaacaataataaaaagcagatctgaatagactgctttttgtttagtgtgaccgtggaaaattgtagtataatagtaataaaataatcattttatttagacattatttcttaaaggagtaagcttatggatttacttaattagacttacattatatctacaattataggagctgctgggttcattagtttattgtggttctcttattttaatgataaaggtgaaatataaagcagagcattgggttaatctgtatattgattatgatgatccaaagctaaaaagtaaggggggggattaatgatgacagaagacttttattgcggtgaagtattaagcggaaaaacaaaagtaaataaagttttagaaaccgagaatgtattggcgtatcatcatacaagacctttttggccggtgcatattgttgctattccttaaaaacatatctcttctttaatcactttggaagaagacgacaacgaacttttactcgagttgatgggtgtgattaaaaaggttgcagcgaaggtgacaaaagaaagtggttcttgcagggtgcttacaaacttaggagattatcaggactcaaagcatctgcattggcatatagcttcaggagatccattgagataaaagaatccttttatataaaatatacctaatgagtaaggtaaattacaatacaagaaacttttgatctcgtggtggaaaaatatggatacttatcaaaagatgctcgatgaagcaataatgaaaattttaaaagaagaggctgaagcaggaaaggaattagataaagaaaaactaaacaaaagaattattgatcttactaaagaggccccatcaagtatttctaaacatgtatatgaaagtttaaaagccgatatggctagaatgtattctgaagaagaagacattgcaaatgaatttaaatcacgtttacaccaacgttggtatgaaggatttttaatattacaaggtattattaaggtctgtgaagaaatatcaatagatttgcttgataagcattatgaaaaagagcatgttgatgaaaaaagcaaactgattttaagtgttctttttaaattgcattctaaaagtatacaagccggtaaagaagttttagttttgttaaaatcaggttattcagatggtgctatggctaggtggaggagtctacatgaattaaatgttattttcaaaaccttatcctataaatttaaggatatagaatttactcatgatttggtaagtagatttcttgattatagtgaaatagaaagaattaaagaaatctatacatataaaaaagcaactaatgttcttaatttaaatccaatttcacaagaagaagaaaaagaatataaagcaaaaaaagaaagtattttaaagaaatacggtaaagaatttgaaaaaccaaataattgggctagacctttgttttctaatataaataacaaacctctatatttttcagattttgaaaaactggtggggatagatcgattaactccctactataagcaagccaattatcaaattcacgctagcccaaaaggaatatttcaaagtctttctatggtatctactgtgaatcaacaatccttttatctttttggaggatcaaactatggtttatctttacctggacaacttacaggtatttcattaagtcagattactacaagtcttgttttattagaacctaaccttgatagtctagtcatagcaacaacattacaaaaaacggtagatgaatgcatttcaactcttaatgagatacaagaacaactaacaagagaagaaaatgaaaatttttaacaggttacaaataaaataattgttttattctgattaaattagtgggaagggtgttcactttggatcttatgtggataggaattggtttggctgcattgggatactttattagcgatggtttgaaaaacttcaaaaatcctaaaggaagttattcagactatccaactttaattaaggagtcggatcttcattatcaccttggtttaagtaaagcagaagtcaaagaattgctggaaaaattcccgggtgctccaaaattagaattaaaaggaacagtctattatccttaccagcaatttttgcagtggatgtcatcgattgattatacaaatagttaaagatttaaggagaattgtattatgactacagatcatttaaccaaagagcgccttaagaatctggaaaaagaaaaagaggtatttaagataggtttctcgcctaactgttccatggttaattagtgcgatttcttaattgatgtaacctttggtcatacattttgaataacgaacccgaatactatctattgagctttcatttctcaataaaataaaaaatctcaaaagaatttcaaaattttcacgatttctggcggaaaatgcattataatgtgaaagcattactttaaaaatggtagcaatgaactaggaggaagtcatggtaagcaagaagaacaaaattgtagcggcattattagcatttttcttcgggggtctgggaatacataagttttatttgggaagagtaggacaaggtattctatatattttgttttgctggactggtatcccctctattatcgcatttattgaattcattatttttctttgtggtagcgaagaagggtttgatcaaaagtacaatttttattactttcagcagcaatctaaagcttaattttaaagagggatatacagtccctctttaaataaaataagaattttaaagatttttattttgaattggaggctcggttacatcccacagttaccctgattgtcaattctttttttctttttcagagtcctttcaaataaaaatcttgcaacttctttgtaaaactgatctaagctatcatcctcaaatttttggtcaataattctaattgagcagttctttcttagtataaccttaattgttttcttcttcagttcttcatattcttcatattcttcatagatttgcttcccttcattagacaagcggcagcacaataatttcacaatctctactgtatatctcctttatagaaatggttcaatgggaattcattgcagatattactccatctgaattagaaacaagaattgtgatcctacgaaaaaaggatcaggatatggtggaagaagaccacttataatgtgtttctaggtatttgtaattaaattacaaatacttttaatatttgctcatgaattcgtggtattatactgaaggggacgatcaaaagctttggcattagtaattaagaatgttttaaatgtatacgagtgctacctcaaagtcggaaaaaatattataggaggtaacatatgtttaagtttaaaaagaatttcttagttggattatcggcagctttaatgagtattagcttgttttcggcaaccgcctctgcagctagcacagactactggcaaaattggactgatgggggcggtatagtaaacgctgttaatgggtctggcgggaattacagtgttaattggtctaataccggaaattttgttgttggtaaaggttggactacaggttcgccatttaggacgataaactataatgccggagtttgggcaccgaatggcaatggatatttaactttatatggttggacgagatcacctctcatagaatattatgtagtggattcatggggtacttatagacctactggaacgtataaaggtactgtaaaaagtgatgggggtacatatgacatatatacaactacacgttataacgcaccttccattgatggcgatcgcactacttttacgcagtactggagtgttcgtcagacgaagagaccaactggaagcaacgctacaatcactttcagcaatcatgtgaacgcatggaagagccatggaatgaatctgggcagtaattgggcttaccaagtcatggcgacagaaggatatcaaagtagtggaagttctaacgtaacagtgtggtagcagatcatctttaatcaggggtagctaacgggctgatgatcgttccttgagaagttttataatcaatgattattaaaatcgttagtaatggttaaaggttgttttctactaggtgaacggccttggaattactggaggtagggtattctccatctggttttataacttttcctataggttaatagaatggtatttaaatgagaatgctatcaattttttgtagtcagcgcttgctcacaacagacacctttacataacccttctttatcaaacataagccttactcaaaataaaaatatctcagtagttaaccagaatcctcataactttatactagttaacggtgggactgttaagaacaaaaagtctaatttataaatggggactctactgaacaagacaggttagttcgaaaagaacccaactttaggatttccttagaggattgtatcagctcgaaccaagttttttaatgcgactagctatggaaattaagaaaagaacctggtgaaattgcccaggttctttttatattgcacaaaaacagacacggtgatataatcacactacgtgcgctttctggttaaaaagttagagatatccatcttataattttattatatcctgctaggaagctcttgtcaatatttatttttgaaggggagatgtagaatgagttctttggttctcggtttacataaaattgaaaaaacacagttttcgctcgttggaggaaaagggttacatttaggggaattatcaaaaattcaaggtatacaagtaccagaaggattttgtgtcacaacagtaggatatcaaaaagccatcgaacaaaacgaaacgttacaagtgttgttggatcaattgaccatgctaaaagttgaggaccgagatcaaattggtaacatcagccggaagattcggcaaatcattttggaagtagacattccttccgatgttgtgaaagcagtggctcactatctctcccagttcggcgaggaacatgcctatgccgtgcgttctagtgcaactgctgaagatttaccacatgcttcttttgccggtcaacaagacacctatttaaatattatcggcgtcgatgcaatcttgcagcatatcagtaaatgctgggcgtccctatttacggatcgcgcggttatttaccgtatgcaaaatggatttgaccacagccaagtctatttatccgttatcgttcaaaggatggttttccctcaggcttcggggattttatttaccgctgatccgattacctcaagccgaaaggtgttatccatcgatgccggttttggacttggtgaagcactggtttccggattggtgtctgccgattgttataaagtacaggatgggcaaatcatcgataagagaatagcaactaaaaaattggctatctacggacgaaaagaaggcggaacagaaacacagcagatcgattctgattagcaaaaggctcaaacactgactgatgaacaaattttacagctggcacgcattggaagacagatcgaagctcatttcggccagccgcaagatatcgaatggtgtttggcccgcgatactttttatattgtacagagtcgtccaatcactactttattccccatccctgaagcgagtgaccaagaaaatcacgtctatatttctgttggtcatcaacaaatgatgacggatcccataaaaccactaggattgtctttttttctgttgacgactgctgcacccatgcgtaaagccggtggaaggctatttgttgatgtcacacatcatctggcatcccctgacagcagagaagttttcttaaaaggcatggggcagcacgatcagctcttaaaagacgcacttatgaacataataaagcgacgagatttcataaagtcgataccaaatgataaaacagcaccaaatcccagcagaggcaatgcagatatgccggctcaagttgaaaacgatccgacaatcgtgtctgatttgattgagagcagtcaaacatcgatagaagagttaaaacaaaacatccaaacgaaatcaggatcaaatttatttcgttttattctggaagatatccaggaattaaagaagattttatttaacccagaaagttctgttgtgattcgaactgctatgaatgcttcattatggattaacgaaaaaatgaacgagtggttaggtgaaaaaaacgcagcagatacgctttctcaatctgtaccccataatattacttcagaaatgggtcttgcgctattagacgtcgcagatgtgattcgtccttatccagaggtaattgattacttacaacatgtaaaagatgataattttttggatgaactggctaagtttgatggcggaagcaaaacccgagacgcgatctatgattatctcagcaaatacggaatgcgatgtaccggagaaattgatattacaagaactcgatggagcgaaaaaccaactacacttatcccaatgattcttaataatatcaataacagtgagcctaatgccagccatcggaaatttgagcaagggcgacaggaagctttgaagaaagaacaagagttattagatcgattgaagcaattaccggatggtgaacaaaaagccaaagaaactaaacgaatgatagatatcatccggaatttcagcgggtttagggaatatccaaaatacggcatggttaatcgatacttcgtttataagcaggctttactggaagaagccgaacgactcgtagaagcgggcgttattcaagaaaaagaagatatatactatctcacttttgaagaacttcacgaagtcgtacgcacacataaactggattataaaatcatcagtacacgaaaagacgagtacaaattatatgaaaaactatctccaccacgtgttatcacgtctgatggtgaaattgttacaggtgagtataaacgagaaaatctcccagccggagcgattgtaggtctacctgtttcctccggagtgatagaggggcgagcgcgtgtcattttaaacatggaagatgctgatttagaagatggagatacctcctttaccgatccaagctggacaccattgtttgtatccataaaaggcctagtcaccgaagttggtggactgatgacccatggagctgttatagcccgtgaatatggcttacctgcagttgttggcgttgaaaatgctgccaagctgataaaagatgggcaacgaattcgcgttcatggtacagaaggctacattgaaatcttataatgtctgatgtgtgtagagagccatcagatattccgccatcagccctaactagaagttgggaggctgcaattgtaccgaatgataaagttcccgttgaactaacgaagatcgatagcacattaagaaaagctggaacctcttggaggaggtctggcttttctatataaaattggcgtagtgtgcaaaagccgcattttacgggcggcgcttctttaaagtgaattgtttattaccagcatttaaacttgtatttgtgcttaaaacaagagaaaaaggagctaaaatgctcctttataaatttaaacaacttttgtataaatagccgtgtaaaacccgattgagtaatcaaaataatgacgtgtaagcgtataagtataaccgttgtattctattgttggctggaagtccattggcagaggactaatgcggtatatagtgtcataatcatattcatcactttttactgcaacctcagacgaagtgccagcagccaatgcgggaaccgcggatattagcatgccaaaggataaagcagaactcaataagattttcttaatcttcaattacatcaactccatttacaatttatacatatattatgctgtgattggaagttgtttcgaaagtgaataatggatcgtaaaaagtaaaaaatctcgattttagcggaataagagtaagggtatggttcgaaggcaaccacatacaaacatttgagaaagaacaaaaagaagtagatccgtttggtgaatgtccctgttgtttattttaaagatcaaaaagagtttaaaatgggcggtattacattaatgacacgccacaatgttgctatttacgaagacaaagatcggaagaaaaaattggttcagatagttttatcattatagatagaggtggcccaaaagcagcctagaaataagcttaaacaaaaaatcctcccaaaaagggaggattactattacatattaactaaagtgtaaatcaatgaaacaatgaataaaaaatacgaaatataagatattgcttttgaagaacttgttttatgtttttggaatgtatagataagtgcaaaacccaagaagaaaactgttacaaaccaagaagtatattatggaaagatggcgaccgccaataccatgattgttgaaaaaataaatgaagagtaatgagttactttatgatcattattcaatgaaatcacctctacgaatttttacccgatttagtctgtgtattaccagcttgtaaaagattcaatatgagaaaatgaagaagtttctggatagatttttacactacagttttttgatatgtagttatggagtgagattgtttaacatgacgggagggagaaaggttgccgaaaattggagtaagcttgatagtgctcattatttttcttgcaggctgcaataaaaatgaacaacacggagaagaaacaaagatgcagagcctagtaggctatgtcgtgcttaaagacaatgaaagggcaattctcattaccgatacaaaagctccagtaaaagaagattacgatctttctgaaggacaacttatgaacaagtttaaaaataacatagtaattgtaggattaagtgagattgataacacagatgatctcaaaagaggtgaaaaaataaaagtgtggttccatacacttaaagagtcaaatccaccaagtgcaacgatacaaaaatatgaattattataaaaaaattgttgaattctcatatagataacctctgagacaacaaatgttgttctattgcattgaaactgccagtgaccaatatcaagttcagttatgttaattcaagtggtttgatatgttagtgtcttcgaacgagacgaaatattgggaagagagtccgaatatcaatgagtattacaaattggtcacagaataagagacttaagagagttgtctgcattgtatgtttacttgaaggagaagaaaatggattttagggtgcttaatcttaattcttgtcaggtcaaactttacttgttccatagaatgaaaacttgccgttaattataataacgtttaattttgtggtgtttaaatatttgattctagaggtcttatgaaagaaccgttcatcaaaaaatgaacggtaggagttaaaaaagtaatgtcttttcctttgtggcaaaaggccaaacactttatttgagatcgttaaggacgacttttgcagcctcagcgataagagcattatcataattagcatctttcgtaaagcggtttgacagaattgccacaacaataggagctctgtttggcggccaaacgatagcaatgtcgttacgtgtcccgtagcttccggctccagatttatcgccgacttcccatcctattggagcgcctgcccgaatcagttcgtcaccagtagcattgcctcgcatccaatcggttaagatcgtgcgtttgtcagtcgtgagagtgttatctaaagtgaaagctttaagatcggttgccagtgcttttgcggtgctggtgtcacgaatatcaccaggaatcgcagagtttagatccgtctcgaatcgtttagctttcgttacatgatccccaatctgtttcagtgacttttcaaaacctttagggccgccaagctgttgcagcaagatgttcccagcggtattatcgctgtaacggatagccgcttccgagatttcttttaggctcatgcctgtatctaggtgtttctctgtgataggagaatatgtaacaagatcgtccttgctgtagtggatgacttcattaagtttttcaattgagtttttcttcaggacagcagctgcggctagaactttataggttgatgcgtaagcaaatcgctcattcggccgataggcgattgtcttgtttgaacctgtatcaattgcataaacaccaagcctggcatcaaattttttctcaagttgaactaattttttattcgttatacagcttgccatgtttgtgtcttctatggattttgcttcggcatgcgttgagctgtaaaaaggtgtgaaaccagtaatgcttaaacataaaagcccaacacatattccgaattttattgacgctttatttttcaacttcatcaagcctcctcattcaaatgattttgtattacctttgaaatgtttcccatgacagttagtgtaacaaacccctttgcgctagtaaacatagaatcaattgatcttatatttttaataagttgggagaacaagggcaattgcccacctacatggtattatataagaataggcaaatcagaatacatatgctgacaatggctgtcagcaaagtcatctattagaaagctttatcaattgtgattggagtgttgttggatgcaaacgagaaaagtttatctctacgtatttcacacaatgtcagactgggaatatggatatttaattgcggaactaaactcagggagatactttaaacaagatgcagcatctttaaaagtagttacagtaggggttaataaagaaatgataactacgttgggaggattaagcataaaaccagatatttctcttgacgaatgtactcttgggagtcaagatcttatcattttacccggaggaaacacttggggagaagatattcatcagccgatcttgaaaaaagttggcgacgctttaaagctcggcacgactattgctgcaatttgtggggcaaccttgggcctcgcgaatgaaggatacttaaattcgagaaagcacacaagcaatgacctagactatatgaaaatggtctgccctaattacaaaggagaaacactatatgaaaaggaacctgcagtatctgataaaaatttggttactgcatcaggaattgctcctctggaatttgcagtagaagtattgaaaaaattagatgtatttgcaccagatacattgcgttcatggtataagctgaataagacttataagcctgagtacttctttgagctaatgaatacaataaatcgatagaaaacactttagcagttttttgtagtgctcctgaacttatgggagcattttttatatgtgtctaggagctatataaagaaatgcagaaacttttaaaaagaatatagattggtaagccttaaaactgttcttattaaggctcatttcatgatgctaaagattcatttggagaagactgtcttgatcagaaaagacccttccaatatattgaagtaaaaagatatcgggaggaactcttttgaaaaagatgttgatgttagcttttacatttcttttggctttgactatccatgtaggggaagcttcggctgttatcgtgaaagatgaggagaaagtgagttttacaatgacagaaaatgaaaaatggtttatgaagtctgatgacctaaattcaaaccattggacatctcactttgggtacagattcaccattttcgatactgaaggatgtacaattaacgcaagaatcatgcgaatgactttgtcaggatatgaaataaccgttagtgaaaaaaacttctcaggggatcattttgatttgagtgcaactgatcgagttgagacgatgccttataagactcattatttgattttgacaaaagatccagattgcggagatgttaaagtaaaaggtctatacggttttcagtttgatcagccagaatggtaataaaaaagtatctggattctcaccagcctaaacgccagccaagctaatgtctacatgcagacattagcttttttcattgtttaataggctgtcgtcaggattctagaagactttctcgtaatagtcgtctcctgtcacatgaagcccaaatgacaggggaaatgtatatcattcacactttccgtcgtgaaaatgtaaatgtattcataaaaatcccgcagcatatcagcagtgcgccgaggataatattgatggtgatctgttcgtgcaattgcagccatccaaagaatagggctaatacgggaacaaacattaatgccatggatgcttttgacgcttggatttgattgagcacccaaaaccatacgacaaaggtaaagccggtggaaagcaagccattaaacagcaatgaccacaccgcctgatatgtccactcggctgaagggaccggctcaaatataaaggaaaacaccaataacatgacggctcccatcataaggtgccaggcattcatgtgaataatatcgatatgcttgaattgtagcttgctgaacacattcgcgattccccagctaagcgctgccgcaagtacgcacagctccccaaataaagcgctttgatcgatattgagcatttcctttccaaatataaataacagtccgaagaggccgcagaccagtcccatcgttttatacacattcattttctcgtttaatgaaaaatggctgatcaccgtaacaaatataggcattgtatataccaaaacagaggttttccctgaatcgacaaactgcattccatacgtcaaaatccccatatagcccagccccatcaagaggctcatgatgatatagcttttgagatgttcttttttaattgaaagcttttttctttggatgaagagaatgagaaataaaggaaccgctccgatgaacaggcgcaaacccgaaaataaaagcggggggatgtcatgaattcctactttcatcgcaacccaagtataaccccaaataagtgtgacagatatgattcccagcataacttttaccataatgaagccgcctttcttgtttaaatatcgtgctggtttctatcatatgttacatttatgtataactgaaatacatttttattattgggggtataaccaaatggttatgaacatgaaccatcttcacatatttgtaaaagtcggggagaaattgaatattacagaagcggcaaaagaattgttcatctctcagccggcggtaagtaaagcgataaaaaacctggagagctcactgcagctcaaattattgatcagggataaacatcatggtttaatgctgacggacatcggaaaagaaattttgctgctggcgaggcaaatgaagggaattgaaagcaaaatatatcaagtagccaaccgggaaaacaagctgttaaacgggaaggtgaaaattggttcatttcctgcagtttcaacaaatatcatgccacaggcgattgcggcattcagatcaaactacccgctgatccgcatagaattgatcgagggaacctctgaccaaataaaaggatgggttgaagatcggacggttgatatcgggatcgcagcatctccatttgaaccgtttgaaaatcagctattgtgtaacgactatatggtggccgtcatcccgccgcagcgtgacgaattaaaacttgaaaagcatgtcgaccttgaaacatatcaagatgacctcattttttgtaaaggcggtcatgaaatcgcgatgtcaaacgcattttcgcaatacaacatcgaattaaaggaaaacttaactgtgcaaaatgccgaaaccttgattaatatggtcaaaaataacttgggtatcggcatcatttcaaactttacactttcatccgtcccgcatcaattgattaaaaaggacatctttcctagggtcacacgcgatattggcgtcatcgcacattcatttgaagagataacgccggcggcgcatgagtttgtcaaggtgttgaaagcagttgtaatctgaatcagttatcgtggtgcgatgaaatttgaagaagatgaatactcagcggcagagtagaaaaaagcaaccatttgaacgttgcttttcactctatttgggacttgaatgctaagaaaaagattcaccaatctctgcctttgtgggattctgctctttaacttgttttaatgatgctactataagaaagctaacaatcactagcaagagccatgaacttacctttccaaggtgtacgagactccatgtatcgatttggtttggatatttccaagctccaaaaaacgtagcgatattttccgctatccatataaaaaatccgatgagtacaaaagaaagtgcgagcggcatacggtaacgagctccattcacctcgtatgtatcccatgtttgccaaaagacaatgatgacaagcccagataaccaccatcgaaagtctatagaaaaatggtgggtgaaaaaattcaaataaatcgctgcggcaagcggaacaactgcaaaaaaaggcggccacttaatcagttcaaccttaagccttctccatgcctggcacaaataactggctacacttgcgtacataaaaccgctatacaaaggtactccaaatattttggagtatccttcttctggataagaccaggagcccatatggactttaaaaagttccagagcaatcccaataaggtggaataatgtgatcacttttaattcatcccgtgtttcaagaccggaacgcaccatccacaattgcatgagaacgcagataatgagcagccagtcatatcgcggcaagaagggcagtgggatgatttgcgtaatagccaaagaggcaaaaataacggcaggaaacaaacatgaaagggcttgttcccagccaaaatgaacgatttgttttattgctctcatgatgtatgcctcctccatagttgtgttcttcgtgtatggaagggacgcttagtatagcagctagatggatataagtttatgtccataagctcaccgccaatcactttatttttctgttgatcttacatatttttttacgaatcctgtgtgtcttcatcacttcggtattccaatatatccccgggctgacattctaaagccttgcaaatcgcttctaaagttgataatcgaatagcctttgcttttccgtttttcaatatcgaaagattagccatggtgatgccaactctctctgaaagctctgttacgctcattttcctcttagcaagcatcacatcaatgttgataataatcgccatgtcatcacctcagaccgttaagtcattttctgattttatatctatcgcttcttttaacagtttttgaagaacagcagcaaagaccgcaatcaccattgaagcaaaaataataaccaatccgatcacaatgatacccggtgcgtcgtctatctcggcgatcagataaaagacaggcatgcctgctgcgtaaaagatactgatagtgactgcgcaatattttatattcttcaaagctcttacagacaaacccgagaaagctttgtttttgtcaatatagcttaaaagtttgaacgcttgataaagagcaaagtaaaaaggtatcgccgttacatacaaatagatgaaaacgagatattttatataagcgatatttggaaataattctgctgaatagttggctatcttaggcactaaaaaaatgcataaagcaagaattggaattccaataagaaccaaagctatctttaaaaaaattgtcgacattcgattcataacaagcacctcatttatttgttgtctaattgaatgtaacaaaaaatttatcgtttctcaataaaaaaatattgaaatgaattgattttttgttgttataggagacccttttcatttttgacaagacaaaaaagcatccctcatcactgggagatgctgaactacttcaaacttgccgactgaatgaaccgtgtgcctcagtgagctcagggatcggtgtgaacaaagctaagctcttttatgaaggtttttatcaacgtctaaagattcaaacaaacgatgggaagaaatacatcaaaggataagcggctgttcatactaatgatcgggaggtaaaccgacttatgatacaaattttgatcactggtctttttttattggctcagccgagtgagccgcaggacagtttaacgatcacacagcaaggacggacgattgccactgttaaccgtgaagactttacaatgcctcttcccggcactccaatggttgactatgaaaaatacagtaaattcatcaaacagcttgatcagaaagtgtaccgtgagccgataaatgctgtccttaacgatcatggaagcatcgtcccgggcagggttggctacaaactgtatcaacaggcgtttatggaaaagttttatgcgtatttttatgggcaaggtccctccaagatagaagtgccggaaatgaacatttatccgaaagttgacagcgagctgctagctcacatcagtacgcagcagcttggtcagtacgtgacatattttaactcaagcaataaaagccgttcacacaatatttctctttctgcaaaagcaatcgacaatcacgttgttttccctaatgagacgttttcgtttaaccaagttgtgggaatgagaactcggaacaaaggatataaaagtgcacccattattgtaaaaggggagttgtctgaaggtgtaggaggaggaatttgtcaggtgtcctcaactctatttaatgcagtcgatcgtgcaggactgcagatcgttcagcgctattctcatactagaagtgtaccatatgtaccgcccggacgggatgcgacggtaagctggggaggtcctgactttcgctttcaaaaccaatataaccaaccaatcttaattcgggcaaaaaggtatgggggaagtatgattattacgctatactcttctgatgtgataaacagcaaattgagaaaaatccccaaagctccatctcggataccgaaagaaataaatgcagagcagtaaagacaaaacctcaggtaaggttttggttaagagagcttgtagattgctcaaaatcaattctttaaggaacggccagtgaaaaggaaggagggataaatgaagtgaaaagggtattattttctgtaattgtttttacagcagttggatttacgttttgccaatcaaaagcgcatgccctgacttttacggtgttgcctattacacaaaaaacagaccagtggtcagtaaaagtaagtgaagcaaaaaatgcaaaggaatttgcgagacctcaaaaaggagaatatcaagtatattccttggaagtcaaaaatataggggaaaaagcagctacagtggatgtgcaattgtatagaaatgaccctaattcaatcacaaggttttcgctttttggatgtcccgatgaaaattgtgtcaaaccaaaagaagattctaaaatgttagctgaaagtttaaatgatggctcaccgctgaagttcaatcattttatgctggcagataaggcctctgaattagaggttgttataatttggacacagaaggtgcaagaaggacgcaatttaaaacagacctttaaattcactgaagatggcgttaattagacagtaaagatggaatggctttggtgattcgatctcttactttgcctgaggaaaaaacgaaaataattgttggaaaaccaatcatagctgagccaaatgtcaaagtgactgtgatttatgactatagagaagaaccagaggccttttggatactttatccgatgggagtgaaatgtttgtcgatgatcacaaagtctttattgaatacgaatagagactttgtgactgactgcgcatttcagcataatattttactgataatgacagtgacacctaaacaagtgcagcccgttcatcattaaaaaactctaatttcgaaattttcagagttcaatttcagtcaattcagttatcatcgaaagaagaggcacaaaagtcaccagctatttggacaacttttagcgttttttttgatgggagatttgtgactcacgagatcatgagtataaataaatttgaaaagttacttaatacactagcttgatttttaataataaaaagccattttaaggttcttgactcaatgaaacaaaaaatgcatttaagagctgttatacgttttaatcttgtctttagagagcactttaatttaagtcaaaagtttagacagtcatctgttagatcattagcccttttttattttcttttcggtaacattttgatcatattttcctactaaaaagttaggaaagtggggaaaaacatgagaaaaaagaataatattaagaaatggctattgatcattgctgtattcttgatcatctgcatcaccacattattagtaatggtgtcaggaaacgaagtgaaatatgagggcagcgggaaaagcggactgtggatgtctaaccttgaaaaatcagacaaaacttcaattggacccaattattttctaaatctatattggcaggggagtaagaaggaagaaaagtggactgttgttgaaagaattactctgtatgtagatggcgaaaagtatcaagatgataacgtagatgagtacgacttatcagagtacacaggtgatgaaatgccaggtgggggacgcatggaggaccatattgccacctttgattatatgcctgaagatgaagtgataggacatgatgtattagtaaaagtggagtggaggacaggccagaaaaaacagacagaagaaatcaaattacataagaagccatggtataaaaaatagcttattcgctgtatttgtgatcacattggttgtcacttttttatttgcggattcctaggcacagcaatctaagattctgcataggctgaaataaaatcttgttcatttctaaaacgaggtgcatgctgttggaacaacaaccaatcaatcatgatgacagaaacgtgccgcagcctattcgaagtgatggagctggagctattgatgcaggcccgcgaaatatgatgcgggatattcaaaatccgaatatacttgttccgcctgtcacagatgaaggtatgattcctaacttgagattttcattctcagacgctcccatgaaattagatcatggcggctggtcaagagaaatcactgtaagacagcttccgatttcgactgcgattgcaggtgtaaacatgagcttaactgcgggaggcgtccgtgagcttcattggcataagcaagcggagtgggcttatatgcttttgggacgggcacgtatcaccgctgttgaccaagacggacgaaatttcattgctgatgttggtcccggcgacctatggtacttcccagcaggaattccgcattccatacagggattggaacactgcgagtttctgctcgtattcgatgatggaaacttttctgagttttcaacgttaaccatttcagattggcttgcacacacaccaaaagacgttctgtctgcaaatttcggtgtcccagagaatgctttcaactctcttccgtctgagcaagtctatatttaccaagggaatgtgccgggatcagtcgcgagtgaagacattcagtcaccatatggaaaagtccccatgacctttaaacacgagttgttaaatcaacccccaattcaaatgccaggggggagtgtacgaattgtggattcttctaacttcccaatttcaaaaacgatagccgctgcacttgttcagattgagcctggcgcgatgagagagcttcattggcatcccaatagcgatgagtggcaatattatctaacaggacagggacgaatgacggtatttatcggaaatgggactgcccgcacatttgattatagagcaggcgacgttggatacgtaccttctaatgctggccactatatacaaaatactggtacagaaacattatggtttttagaaatgttcaaaagtaaccgctatgcagatgtgtcactcaatcagtggatggcattgacgcctaaagaattagtgcaaagcaacttgaatgctggatcagtcatgcttgattctctgcgtaagaagaaagtgcctgttgtgaaatatcccggtacgtaaagacgtaacagatcacacagctgcccttcatatctttttaaagtagatagagctgaattttggcctgtgttttattaaatccctatatatacgttatgtagggtttttctgcttgaatcgtattgtaatgagctttaaaatgttaatgtggaaatgaaatggtaaccattcgataatggggattcaatggccgatttctaccagtttgattggctttaaaggaggagaagaaatgaaagcactcatatttttatccagtttgactgccattgggagctctatattggggcgatggttagggatgctggatgattcttatgctgttggcgatgcttggtttataggtgttttagctggattgatttcacttctaatattgattgacagtcaaacgatgacaaagaattacatagtaagtttaagtacgatactaggcattcttggagtgggatttatatattttccagctgcattcatcaacatattattaagtattacactggataaacaaaagaaagaagaccttcatgtaagatgaaagaaatttcatttaattcttaggagggaaagtgtatggatttacctctatgggcttatatcatatttgcaatccacaggtgcggcaggtttcataagtttaatgtggttcagtttttttgctgacaaaatagaaaagtgaagcgattttataaaaatgtaaactattttatatgaaaggaataacattgcttatttaagtttacataataaaattatttcaaactgatgctaaagataactaattgatctatgtactaaatattcataattactagagggattggcacctaaggaacaaagctatttgacaagttcttgctagagaattttttcaatcactacatatgattttctgcatcaagaagctcagctgaattatttttgggtgaatttactaatgatgaaacctggtatgcttccatgtcatcagcatcataaggcagcagcaaactttgcagataatcagggcttgtatttttggggttaagccactccttttcatgatcatgggccaatataaccggcattcggtcgtgtatatctttcatgaactcattaggctcagttgttatgatggtgcaggtataaagagggtatccttgatgtgtgctccacttttcatataagccagcaaacgcaaaaagagcagatgatttcaatttgatccgcattgggattttggttttggaatcaagccgtttccattcataaaaactgtctgctggtatgatgcagcgtttgctgacaagcggtcttcgaaaggccggtttctcggtaattgtttcggctcgagcattgatcattttataaccgatcttttcatcttttgcccaaggtggaataagtccccatctaagcttgcctaagcgattatttgatccatcattgatgattgcaaggatgttttgtgatggtgcgacattatagcttggctggtattcacctttaggaaaaaattgatcgatgtcaaactggtcaataatatcatcaaatgcagagaacaaagtaaacctgccgcacatatccatcatcctttttaggggtttttgaatagtgtgtgggacgaacgttcatttaatacaggtccagaacaatgatttcttttcacttgcgataaactggtataataagaaagccagttaagaagttattgtggaaaagaacatatgcttttttgtttgaccgacgctggatcttgatggaattacaaggatcgcttaaaaatagcctatagtataaaaagaggcacaacgtttttaacgcatggcctcttttatatcagtagccaaataccagagttgtactttgtgatccggcatatttcgtgacaaattcttttgtatattccggcgtttggacacgatagctatagtttgacccgggattccaagaagtcagcggagaggtttgcttgttgagtgatggatagctgcctatgtctttgaaataaccagtgcccttgtcgtcaaggatgccgcctttttcactgcctttcccaaagtaattatattcggaatatatttttgcttttgtagcaattgtaatcgcctggttaaaattgttgctgtaattgtttttaacatgaaagtaaccgtatctcatcagacctgggcctctaacatacaagttctcaaaataattattggcgattgtcatgtgagggtagccgtcatattgatgctgagaatcatccgggtatcctaaaatcaaaccgtatttatgattcgcaaattttgagttgctgatcgtgatataatctgcggattttccgatatacaggagtttgtccaaatcacttccgcttgcactatagctatgacctgagaatgtgacgtgatcaatccaatagttcataccggaatctaaataaagctggatatcattatttccgttaatctgcggactgtgttcaaacgttaaattttgaaaaatgacatttccagaagctgatgaagttgttaaataaatatttttcagcgtttttttcgcgtaagagcccacgagtgttttatttgagccaatggtaactgttgttttcgcagatgcggaaagatcattttgaagcactaaaattttcggagtggatcctcctagatgggtttttaaatcatttacgctttgaatgtaaacaatctgcccgttttttccacccgttgtgcccgttttagaaatgcctttttcatttttggcatttccggcaaaacctaaaaggccatttgttgaggtattcggaaaatcgactgcacctaatgcttttccaggcaagagaaccaaaaacaagctaaagacggtgaaccataaacaaagtcgtttcatcacaatatgcttcctttcaattttaatttccttgcggggattattattacagttaatggaaaggaatgataggttctatcttcctaattaatgttgggttatttaaaaaatagagattgcgccaaaagacatactaacaattgaaatagaagaaaggattgatacaccgttgactgcagcagcttatcgaaacaccttgctatcacttttatgtttaacagctggaatcgtggatgtaatcgggtatttaagcctgggacatgtgttcacagctaatatgactggaaacattgtattattggggttagctatcggcaaatccattcaggtcactgtttttaattccttgactgcgctaatcggatttatatgcggcgtgatcattgctacattgatggtcggaaaggcggaaaataccctttggccttctgctgtgacaaaagccctcgcacttgaagcattcattttgtttgtctttgcttgtctttctttttaccgggcatttgttcctgtgcacattctaattatactcatgagcatttctatggggattcaaactacagcagcaaaaaaactggggattgcaggtatttcttcaactgtgttgaccggcactttggcttctcttttagaggatatatccggccgtttgttttttaagaagcaaaagaagactttcttaagagatactgtgttaagagcactggctattattttgtattgtgtaggggctattattgttgctctggctgagcctgatttttatcacttcattatttgggttccgattgtgctgatctttggcatcatgatgacagctaagttgaaactgagcggggaaaaatagcttttcctgtatagctgttatcaggccaacagcctgtttcatttcgttattgaaatgcgaattttgagagggaaaaataagacattcggctgaagtgcacattcgttcatttgtattggctttttcataagtacctacatttgatatatgaatgatagtgaatttgccttaaaatcaactatgaatctatttcctctttcaaaccagatggattgagtcttataatgataatgattctcatttgaagtctggtttgaggaggaccaaatatgaaaaagatcatgagtgcatttgttggtatggttttgttgacgatcttctgtttttccccgcaagcttcggcagcatatgacgacctgcatgaaggttatgcaacgtatacagggtcaggctattcaggaggagctttcctgctggatcccattccttccgatatggagattactgcaataaatccggcggatctcaattacggaggagtaaaagcggcacttgccggctcttatttggaagttgaagggccaaaagggaaaacaaccgtatatgttactgatctttatcccgaaggcgctcggggagctcttgatctgtcacctaatgccttccgtaaaatcggcaatatgaaagacggaaaaatcaatattaaatggcgtgttgtcaaagccccaatcaccggcaatttcacgtaccggatcaaagaaggcagcagcaggtggtgggcagcaatccaagtcagaaatcacaagtatcctgttatgaaaatggaatatgaaaaggatggtaagtggatcaacatggagaaaatggactataaccattttgtgagtacgaatttaggtactggctctctcaaagtcagaatgactgacatccgcggaaaagttgtgaaagacaccattccaaagctgcctgaaagcggaacgtccaaagcctatacagtaccgggccatgttcagtttcctgaataaaaaatacgaaacagcggatcttttcccgctgttttttcaatgttctgtatctgcatgtaaaaatgttttaatcatgttcaactgctcctgctttggataactggtatacagcctgcttgaaatccgaataggatctccgaaaaaatatctttcgtagtgagtttgtctagttccgaatgaactcattgttaaatcccatgccaaacggaaaattttcacacgttcttcagcatttgtattggttgcttgaagatattggtcaagatcttcccgtatctctgagtcaaatgcattttcggtaggcagtgtcaccattccgctagctccaattaattgtatgatttcagtaaatcgaggatatagcttaggaatgatcgtactgatgacttgaagaggaattaaacaggggcgcatatagccgaattcatctaactgagcatcattttccgatttgtcaatgagggctttgattgtttccaatcccacaatgatttctgagagcttttcttggatgtgctgatattcggaaacattaatggtgtcgacaagaagctgtgcaacacctaatagaaattcaatttttatcatttgcctaatgacaacctggtgaaaggtaaaggcatgaaaagagctttttgtcataaaatctttagctgcttccacattatcgtaaaaaaacacacgattccacggcactaacacatgatcaaaaaccacaattgaatccatttcttcataccttgagcttaagggatgattaaaggaagagtcgcttaatacaaatgattctcttgtgatgaattttacgccttttgtattagaagggattgaaaaagcataagcttcatctgtttcaaagaaaaatttaggcgctgaaaaaaccaagatttcatcggtcaacccgccttgtgtggcaagcagtcgtgcgccatgaatcattaaacctttttcggttctatcaatgactttagcagatatcggtttttcacttagcccaaaataggactgtgaccggttcacttgcggagtaatgaatgtatgggtaaaggaaaggtcatgcttagcagcttgttcatacatatctagtatatgttcaggaaagcaattctctttatcttttagaagctccgctgacgaagcaaagctcatcataaccgtattcatgtaatccggacttctccccatcattccatgagtatgtctagcccaatgttcaatcatggtccttctttttttcaaatcattttttgttttaggctggagataggaaaggccgattcgattatgatctccaggaaggcaataagtcatttcatgtattaactcatcctttgtttgcaattcataaagtgagctttttgttttgattattcctttaaatgcaggatgctcagaaatgttaccctttattttttcgccatcataccatatttcgttttctagtttattcaatcggtcaatgaattctttaccattgatgatccccatttaagtttcgctccttcatattatgctgcgtattgtattatattttcgagaaaacagccggttcagccaatttgaggtgggaaaagccttttttagaaaaacgaataagagtgacttacataccgcaaaagactgcaaattttacttaaggtttttctgtaagttcagagacgtaaagaatttgcttattcatataagaatatcactataaaacttgataacacgtgtcgatattatggacatgagcgtaagcgaattggattcaaacgcgcttgaacatattttatttcagccattacattgtgcggaaagggaaaacgacacatgaaagtgaaaacaaaattgctggggattatatcaatattagttgtttcaattattggaattggaggctcctcagtatttatgatttcttctactgtgaaaaagaatgaagaacttaaagacaaaatggaattccaaaaagagataaaacacatccaatatgaattgaccgggttatcaaatgatgaaagaggcttcttgattaccagagacaaagaatacgacgagggtatgaagggaaaagcagacgatgtcttaaagagccttgaccgggttaatgacttgattgatgaagagaagtatcaatccaatattgaagacattaagacaagttttactcagtatagagctttgaatcagcaagtagtaacagcctactcttcaaatcctaaaaaagcagaaaccatccattttggagaagaaagaacaataagaaaagaaggcgtagctccggctgtcaataagctgtctgatcgcctggatcaagaggtagaggatctaaaggatgaaatacagggcaatgggaaaatgagtcaatcgctcattatcattgtcacagggatatcagtaatattaggcattgttctaagcataatgctgttaaagtccattatggtgccactaagaagcataaataagcagctggaggaaattgcacacggcgaggctgatttaaccaaaaaagtcattgtgaaaaataaagatgaatttggccagcttgcccaatcttttaattcttttactcattcattaactcaaattgtgaagcagatcagcagctcatctgaacaagtcgccgcttcctctgaagaattatcggcaagcgcggaagaatcgaaatcaacatctgaacatatttcacgagccatgcagatggctgccgacagcaatgtgaagcaaagctcaatgacagaaaagagcgcagaatccatcactgaattattagacagtatatcatcagtcgcttcaaatacagggaacatagcggatctttcttcttcgatgagagacaaggctgaaataggctctaagtccgtcaacaagatgttagaccagatgaaattcattgataaatctgtagattcagccggcaatggattgcaaacattggtagcgagcacagcagaaatcagcgatatctcttcgcttatcacgacgatttcagagcagacaaatttgttggcactaaatgcagcgatcgaggcggccagagccggagagcaaggaaaaggatttgctgtggtggcagaagaagttcggaagttggcggatgaaacaaataaatctgcaaaccacatccaatcggtggtagcgaccatccaaaacgaatcgatagaaacggtaaataatattaaagttgttcaagaaaatgtgagctcaggtattgttctttctcaagagacaacaggaaatttcaatgaaatactgaacctggtggaacaggtcacttctcaaatacaagaagttgcagcagcaactcaacagcttacttcaggcgttgaagtgattcagcacacagttcatacattggctgctggtacaaaagaaacgtcagcaaatacagaagcggttgcaaattcatcacaggaacagcttcattcaatgggggaaatctcctatgccgcagaatctctatctcagttggcagaagaacttcaaaccgtcattaatcgttttaaatattaaacaggctacttacgtgcaacccccatcttattcggtgggggttggctacttttactgtggttgtttctaaaaacagagttaactgacttcttttaagttagttccgtttgtatggctagtccaaattttgatcgattgtcccttcaaaatagtcatcgctgacctgttcatgagtttcagccaatcctttttctaattgcgtgcttcctttataatctgagggctcaaagtatttcccggcaacatctgttgtgtcatttttgttttctttgttatgagtttgtgtttcagtgtttacactttctgtctcagtattgctgcgtatagattgctgaaaatcatattccttgtctaatgaagaaaatcttttataatcatcaggtctgtctgcaccgtttttttgagtcactttacttcctccagattattgatattttagtgggggtaagaacttatttcgttcttttaggatcggaaccgtgttttttaggatcatctgctttaaaagctgtttcagtctcatggtcatttcttatttgttcaatacttgaattttgaattccctttttactcattggtttcactcctttacgaaaagtgttgaatatcaactcttcttattttgtctgttgatcaggtattcatgcacttttttctttcgcgctttggccaatcaggagaggcgttttcatgccagcgtattatctaataaaagaacgtcatttttgaaaccttttattagcgcattgcgtatagcacgttagggaagacatctcgataaaagaaatacaaaggttgtgaatttatactaacagcactatgaataaatcaaacaaggggggtgaaaaaatgaaaaaaatcgcatcatattatttaatgacattagggctatccagccttacatttggtttgttattagggttttattctttcgttatgtatggcgatatgataattgcattgtttacggcagcaattgctttattatacggttttgtggtgtatggcctttttgctgttccgctccaaatgaagttgcagaaaaaagcgagaactttcaatgtcatgtacctattgatttacagtgtggttgcttttatcgcagctttcctgttttttgttatcaatgaacctgcgtcaatagcatggacattgcaatcgtacttttattatatgttaagtattgcggctgcagtaatttactggttatgggattctctgatcctttataaacgtacagcttccggtgtataggctaatttttaccaatcggagaaatatggaggttcaataaaaattcaggatctaaaagctttaggtttcatatttttttaaaaaaatcctccgcggataaaggcgcagtatgggggcataatgagagcacacattcgaaccgaataggttttctaagtgttttacgatacatacgttcatcaagaacatcacgtcatcaaaggaatataaaaactattgttgtggaacgggcatctcgagccgtttgaggaaagaacatagatggtggtttatcgttttatcagcgcttatagaacaaagttttggtggcaggatccatacagctaaacagaggagagcgtgacaatgaatctcgctctcctcagatttgttttattcaccctgatgtttttcaactaatgtgaatgtccaatcttttaacatatgtttctgtacatatttttttccgtttatttcaatgtaaggcaggtctgccatgtctccagctaactgttttgcttcagtcgttgttattcctaaaaaaagtccgatgtaaaagtaaatatcccgttcttttataagcaagatatcattttgttcactaccttttgtatggttcatctgctttaagccttcaccgataaaatatcctgccaaagcaataccaattcctaaaaaaacgtccatgtgtatgcctccattatgtcaatgttatgttatacgggcttggcatactccgggtttcattatttttcaaaccttttcaatctgtacacggcctgaaaaaaaggtggcgccgccgcccatatcggacaatcggtctggggttagcgcgtttacaagctgtttttttccttgttcatccgcccataatccttggctgacaacgacacctggcagcacttgttctccaactgcagcggtcagctcgcattctccccggctgttccaaattcgtacaggtgccccatcaacgattccgtgttcttcagcatcttttgtgttgataaagagctttggcgtcttttcaagcttgatgtgtttttcattattggaaaatgttgagtttaagaaattatggtttggccccggaacatacataaacggatgttcattatcggttacaagaggtgtatatgtcggtaaagcagggaagccgtcttgtttcattttttctgaatataattctatttttccgcttggcgttggaagttcgcccggaaacagcggcttttcacgtttcgctttcataaatgaattcttagtaagtgaatcgtaatcaatctctgccaaatgcggattatctggatggtcaagcgcctggcggattaattcttcatctgaatctttaagctcctgatctgtgaatcccattgcttcagccattaatcggaacacctcagtgttagacttgctttccccatatctctcaatcaccggctgctgaagctgaatgtaatggtgccagtaggaggtgtaaaaatcagtattttcaaaagcggatgttgcaggcagtacaatgtccgcatatgcagccgtttccgttaaaaacaaatcatgaaccacagtaaacaagtcttcccgcagcaagccctgtctgactttgtttgcttccggcgcaacgacggccgggttcgttccgtaaataaaaagcgagcgaataggcggatctgtttccaaaagcaccttgccaagctgattcatattaaacgacctcggggtgcgccctttcaataagtcgggccgctgcaaggcatttgtgttatattctaaaattccgctgttatgcttaattgcgccgccccctgtgtgcagccattggccggtgatcgccggaagacaggcaatcgtcctgacaatcatcccgccgttatcgtgatgctggggtccgtttccgattctgataaaagaaggggaggtttccccgtacatttttgccagtcggtaaatatcttcggtactgacactggtgatcgtcgataccttttcaggatcatattgtttcacgtgttcacggagctcttcatagccaaccgtgtactcggacagaaatgcttcatcatgaaggttttctttaaataaaatgtgcatgatgccaagagcaagtgcactgtcggttcccggttttattgggataaaccaatctgcaagacgtcctgtttgatttttatgcacatcgatcacgacaattttggcaccttgttttcgcgctttttgggcgatcgtaatttggtgcatgtttgtactgaccgcgttgattccccaaaaaataaatagttttgtatgaatggtttcctcaggatcgattcccgcgcttatgcccattgtatatttatagccttcagatcccgctttgctgcaaatcgtccgttcaagctggcttgaccccatgcggtaaaaaaagcggcggtccattccttcagctgtcaatttccccatatttccgtaaaagctgtaaggaagtatgctttcagctccctctgcatcaatcagctgtttccagcgggaggtgatcgtatcgattgcctcttcccaagaaatcggttcaaatatcgcttggcctttcgcacctgttcgtttgagcggtgtagtcagccgctttttatcatatatgcgctccgtcatattccggactttgttgcatatgtttccggctgtgacaggatgatcagggtctccttgcacttttacgattttcccgtcttttttatgtattaacaatccgcactgatccgggcagtccagcgagcaaacggatttgaaaatgtcgttttgttgtgtggcaaaagatttcatggcccagttcctctctctagttagatattttgtaagaattataacatttcggatcataacgtcaattctgaaaaaagagattgacatcaatctgagacttctttatgataaacgtattctttattctgaaaattacatactcaacattttctatccagagaggtggagggactggccctatgaaacctcggcaacattattgtgccaattccagcaagcgtcagcttgaaagataggaaagcaaggtttataccggcgtctgcctgtaacagagcgcgcctatatatgaatctctttccatcttcggaaagagattttttttatgaaaaatacgatgaaaaggatgttttgcaccatgacggttttggttacagcaccgtacaacgaagaaggacgaaaagagctagaaaacttgtttggctcagttgcttatcaatcttggaaggaacaaggccgggcatatcgggaagatgaactcattcagctgctaaaagcaacaaatgcgacaggcttgattactgagcttgatcaggtaacagacagcgtatttgcttctgttcccgaattttcatttgtcggtgtttgcaggggaatgccctccaatgtggatgtggcagctgcctcaaaaagaggcatacctgttttttatacaccagggcggaatgcacaagccgttgctgaaatgtttattggaaatgtgattacctttctccgccataccagcgtctcgaatcaatggctgaaggatggaaagtgggacagggattacttacaggcttatgtcaaatttaaaggaaatgaattatcaggaaaaacggttggcatgattgggttcggggcggttggccaaaggattgcaaaactgctgactgcgtttgactgtaaaataaagtattacgatccatacattcaagacgatcatccgttgtatgaaaaagtatctcttaaaacggtgttttcagacagtgatatcgtttctgtacatctgcctcgtactgaggaaacacttggacttattgatcggaagtattttgatctgatgaaacagagtgcgattttcgtcaatacttcaagagcagttgttgtaaaccgtgaagatcttttatctgtattaaaagaacataaaatcagaggtgcgattttagacgttttttatcatgaacctccagaggaatcagattatgaattgatttcattgcctaatgttctggcaacaccgcatctcgctggagcaacatttgaagtggaggatcatcacgtgacgatactgaataaagccctcaaaaagtggaagggtgaaaaaactcttaatattccgacaatgtataacaaggacgaactgaaaacaggggtataagaaaggaggctaacagaatgaaaaaacaaaaaggctatcttgtttttgatattggcacaggcaatgcgagggtagcggtcgtgagtgtaaccggcagtgttttaacagttgaacgggaggacatcgtgtattccacagagacgctttacccggacagccgttatttttctcctcaggtgctgtggaagcaggtgatgaatttggcaaaacgtgcgctatcccgttcgtgtgatattgacatcattggtttgacatcgacgagccaaagacaggggattgttttgattgatcaaaacggcaatccttttctcgggctgccgaacatcgataatcgcggccgagagtgggaggcgggcattcccgatcgggaagagatatacagccgcacaggccgcctgccaaccgcacttttttctgcgctcaagctttatggattaaaacagcgccagccctctttatgggaaaagactgcaagctttacaagcatcagtgattgggtgacgtaccaactgagcggaagattaacatatgaaccatcacaggcaacagaaaccctgctgtttgatgtgaagcaaaacacttggtcagaagagatgtgcgacatattcggcttttctccatctatccttccgcctcttgtaagagcgggaacagcaattggaacgatagcaaatgaatatgcatccgaattaggcctttcaataaatgctaaggttatagcagggggcggggatacacagctggctgtcaaaagcaccggagctggacttgaggacattgtcattgtatcagggacaacaacgccaataaccaaaattactgaggatcatggcgacacaaaacataaagcctggctgaactgtcatgcagatcaagggcattggcttgtggaaacgaatccgggaattaccggcttgaattatcaaaaattaaaacagattttttatccgaatgaaacgtacgaagtaatggaggaggagatttctgcacttgcaaaagaagaccatgcatgtgtagcggctctcggctcttatttatcggctgaaaagaatgcgttaacgagaggcggttttctttttgatgccccgctgtcagcacatttaaagagggcacattttgtacgtgcagcgctagaagagatcgcattttcaatcaaatggaactttgacattttaacagaggttactccgtttgaacgtgactatgtttgggtgtgcggagggggattccaaagcaaagcgctcactcaatatatcgcggatcttcttcaaaaaaaggtctatgtccaagagggatatcatcaggcatctgtcgtcggtgctgcagtcatttgcaatgaaacctttcaattaacggaggagatgtcagcaaatgtccgggtgatcgaaccgaaggactgtcagatagaattggctttatatgaggaatggaagcaaacacagcgctttttttcaggatcagaaagcaaagtattaatttaagacggcatttctgctgttttgaggaatcatttaattttcaactttaataaggtaatacggtaatgaatattagcatctaaggaggagacagatatgttggataaaataggaataccgaagcggcttgcctggggatttttaggggttgttttgtttatgatgggagatggccttgaacaaggctggctcagtccttttttgatcgaaaacgggctcaccgttcagcagtccgcttctatttttagtatatacggaattgcgcttgccatagcttcctggttttcgggtgtatgtctcgaagcatttggcgcaaaacgaacgatgtttatggggctgttgttttatgtgatcggtacagctgcttttatcgtatttggatttgaacagctgaacctgccagtgatgtatgtgacttacttcgtaaaagggttaggttacccgctttttgcttattctttcttgacatgggtcatttacagaacaccgcaaagcaaactgagcactgctgtcggctggttttggatagcatattgcctcggcatgtttgtgttcggcgcttggtactcaagctacgcgatcaaagcgttcggttatttgaatacgctttggagctctattttctgggtatgtctcggtgcattttttgcattgtttatcaataaagaccgttttgaaaagaagaaaagaaaaagatcagaaacagccgaggagcttttaaaaggggttacgattttatttacaaatccgcgcgtgcttacaggcggaatcatcagaatcatcaacagcattggtacatatggttttccagtctttttgccgatgcacatggcccagcatggaatttcaaccaatgtgtggctgcaaatttggggaacgattttcctggggaacattgtgtttaaccttatctttggtattgtcggcgataaattcggctggaaaaatactgttatttggttcggcggagtcggctgcggcattttcaccctcttattatactacgcacctgttttctccggcggaagcttagcggttgtcagcgtgatcggctttatttggggcggtttgctggcaggctatgtgccgattggtgcaattgtgccgacggtggcaggaaaagataaaggggcagccatgtctgtattgaatttggctgcaggtttatcagcgtttgtcggtcccgcgcttgcttggttgttcatcggtctcgtcggtgcgcaaggcgtcgtctggatctttgcggtcctttacgttgcgagtgcaatcatgacgaaatgcattcatatacctgaggaaaaagcagttaaggaggaatcatctcctcaatatgcatcttaattagaaagcgcccattttccggggcgctttttatcatttgttcagcaatgtaaggatttccgatacggaatgacgcaaaaatgattgatctggacgggatttcaccataacagtcagctgataagaaacagaatataagtctgagccgtttgttccacgttaatttcacgtcttagctcgcccgaatgttctctcaaaacaaattcataacggtctccaatgctttattcttcattgaattctcgatgacgagccatcaacattacctctttctgaatcgatcagtatataactattctataaattatcgagggagtctaaagaaaaatagacaacatattgacaatgtaatgagaaatgttaagatgtatagacaataagttgtccattcaaggagggaacatcgtggattattctaaggaactgaaagatttatttttaatgcaacagtcttacgctacatttttttccactttaaacaaaatccaatcacgcggagacgattattatgaaagcttaacgtcgaggcaatttatgacgatggttgccatactgcatttaccggaagaggaaacgacattcaacaacattgcaaaaaaattaggcacttcaaaacaaaacatcaacagacttgtcagcggtattgaaaaaagaggttatgtcatcactgtaccaagtaaacgcgacaagcgtgcagttaatgtgaagattactgattcaggaaagcgtgtcatggaggaatgcggtgaaaaagcggtgtattttatggccgatctatttaaaggcttttcgacggaagagctggaaacattatgggttttattgaagaaactgtacagttttgacggagaagaacaggatggttttgaagaagacgctgctgattttgacattgaacaaaatcgagacaatttgaaaacaaatttattgcaggaattcgcaaaacggagaaagtaaaaaggagaaccaactatgaacaacgtagcaacagtagaaaacttgaaaatgcagtatgaaaacaaaacggcagtagatgggatttcgttcgaagtgagagagggggaagtgcttggcttactaggtccaaatggtgcagggaaaagcacaaccattcatattttatcaggagtattgtcggccagttccggaaatgtttcgatattgggccatagtgtgaaaaaagggtccaaggaaatgaagaaaggcatcgggattgtgcctcaagatatcgcgatttatgaggagatttccgctgagaaaaatgttcgtttttttgccagtctttattctcttaaaggagaagaactgaaagcccgagtcaaagaggctttggagctcgtacagctatatgaccggaaagatgacaagccaaagacgttttcaggcgggatgaaaagaagattaaacattgcgtgcgccattgcccatcagccgaaactgattatcatggatgagcccacggtaggaatcgatccgcaatcccggcatcacattttggaatcgataaaagagctgaaaacaaaaggcgcaagcatcatttactctacacactatatggaagaagtcgaggcaatttcagatcgtattatgatcatgaatgaaggaagaattattgccaatggaacaaaagaagagctgtacagagaagtcaataaagaaataacatacgcttttcaactggcgcatgttcagcgattaaataaaaactcgattagagaaatcataggagtgacaggagttgatttctctgaccatcaactaaatgttaccgttcaaaagaaccaagatcacctgagtgaaatcatattagaattgagtgcccaaggctgcagcatcctaaacatgaacaaaaaagaggcatcgttagaaacggtatttttagagctgacgggaagaaatttaagagattaggagagcaaaatgagtttgttaaaattaataacatttgattttatgaatattttaaggaatccggttcttgtaatagccaatacggtctttccttttgttctgattctggtcatgggctttgttacgaaaagcagctttggagcaggcggggtcagttcttatgattattacggagtgaatatgatgattttcactgcagctctgattgctatgacgacctctaatacgtttatggaggaaaaggtgaagaaggcgaaccttcgtattgtgtatgcgccggtttcgacaactagtatttatctttctaaattactatcaacctttatattcagtgtcattatgtacagcatgaatgtgttgatagcccaaacgatttttcatttgaactttggaggacaatatcttacgtatttcatgcttttattgtatgtatttttatttttcggttgctgttttggcacaatgttctgcagtttgttcaagaatgaagaacaggcgaatgggattatgcaaattccgatagctttttttgttttctttggtggcgtatttttcggaattcatagatttggagataccgtcaatcagatatcgattctttctccgattaaatgggtaacagaatgttcatttcgtctcatttatgatcatgatttcagtatgctgcagcctgttatgtcaggactaatattggcttcaatcatttgtattgccgtttctcatgttgtatttaagccggagggatatatatgctgagtttattccaaaacaggtgggagcgaatcctgaccaaaaaagccattattatcattgcattaatcattatccctctgatgattggcgttgcgattatgttttccgggaagccggttttcaaagaaacaatcgcttttgttacagaactggacgaagttcatcatttgccgagtgattctgcatttagagtggtaacggtagatcagaagccgaagttttctgatctgatgttagggaaatatgcagccattgtagaaaaaaatcaacttgattacagcgtaaccacgttgaaaagtaaagcggatcaaaaaatgattcagcaattttttgagactggagaaatgccaggcagctaccggggagaggatgaattaaggatggaacggggaacgggaacgaatatattaggctttatcatgatgcttgtattgatgcaaggtgtggcattagctgcgttatatccagaagaccggatgctcaaaaccttcaaaaggattttagtgtctcccgtgcatgtggggaaatatttgttggttcagtttatctttacttttttatgtttatacatacccacttacttggccatcctaattacaaatgtactctttcatgctgaaattggtttccgtttaaatattcttgctgggttactgggtgttcttacagtgcttgcaacagcattcgctatctttatggcttctgtgatggatcgaaacatcagtttgatgacgagtggtatcagtgtgatcacgtgtgtattgtcaggctgttttatttcttttgctccacatcatccaatattaaatgccctttgtgcgatactgccacaaaaagcgtatatgactttcattcacggggtagaaatgggggattcaatgtgggaatacaaaactcaggttatttatattttgatgtggtcggctacgttttgtttccttggggattttatcacaagaagaagaaccaataaagggatttatgagtaggggaaaaaagttattagcattgttttaagagatgaaaatcttgtagggattgatcaagaatcaaaacgtcatagctgatgcaggtcatgaatcggacattttaaaggaaaagggatgtggcacagaccaagagaataccgtcattctcttggtttcacaatagaatacacatttgtatcatatggagtaccattttgatacatgtactgtcttaaaacaccttctttttgaaaccccatttttaggagcagacgatttgatgcatcattagcagtaaatacaactgcgccaatacgcgacagtccaagggcagaaaatccgtaagatacgacctttgaaatgacttctgatgcaaaaccgtttcgccaatgctccgggatgatttcataaccgatttccgcgcgcctatgcttttgggccagagcgtgaaagcctattgttccgatcagttctttagtgtcccgtctttcaattccccaccgtataccgcgtttttcttgatagagggcagcaaacgtttgaatcattgaaatggcctgttctatagattccatgttttcaagcccataatagcgtgtcacctcatcgtttgagaaacaagcaaaaatggcttccgcgtcctgatctgtgatttgcctaagtataagccgatccgtttctaatataggaaacattcaaccactccccacgtttgtgtttttgtttatcatatcccttttatttcctcttttctatagcgaaatcaaccaatgcagcaaaggaacgaatttgtgtttctagttgctctttgtttttgctgaattgtttcaaacgatggccgttcgcgcctgatggatggggaaagccgttaaggcaaatcaaattctggaggctgtgttgtctgatcaatgtttcacatactgtttcggccgcttttcctaacggaatgagaagagctggtcccgtcacatggttaagctccgcagggaagtgcccaaaagcataggtgcttaggataggagaatgagtgatagccggtttgtatccggtatagtttttttgctggataaagacaggatatttaataacggaagttgtatggagcatataccgtaattctccaaaaagctttgcggcgctttgaatgccgaaagcttgcggcagcccgcataaatccagcatggtgataaggttatgtctcatcgacccggagaaacccgctgctatttttgtatctaccgccatttgctcaagagtgcggccttgccgcagactttcgactgctgtttcgtacgctgttttcatctgggaaaaacccggcgtgatcccggcaatcacaatcgtagcagtccgattgatatattcattatgaggtgaatagtagatgtcaagttcattttcttgatggagatgaaatggagaaataagtaaatccgactttgtaagtgaagagggaagagaatgtagtttttctgcgaactcctttaagcaactgtggtttacaatcatgcgaaagcctcctcaaaaaatgatatcccattgtccattctgatcgaaacaacgggatatcattcatcatgacctgctatttaaatgaccagcctgccacacctctttaacagctttaggaacttcttttacttcagctgcggtctgctgaaacgcggattttttcatttggacatcctgctgaatcttcttttgtttttgcgtcagcagatctgtttctgtttttaatccttcgatttgtttttgcatagcctgcgtaacagaggaaagctcctttagtgcagggtccatttttttcttgttttgaatcacgttaactcctaagaagataatagaaactgctaatactgcaagactgatataaactataatcatatgttcactccttttcttatgtcattaccctgtatccgtttttttaatcagaagaaatgatatttacacagttcgtttgatttgcgtattggatgtattgtacttataatgtgataacgtacatatgtaaacaaagaaagggtgcttcaattgcaaaatttacaacataaaactgcactaatcacaggcggaggcagaggaattggccgcgctactgctttggcgcttgccaaagaaggcgtgaatatcgggttaattggccggacttccgctaatgtagaaaaagtggctgaagaagtcaaagcgcttggtgtaaaagctgcatttgctgctgcagatgtaaaagatgccgatcaggttaaccaagctgtagctcaagtgaaggaacagctcggtgatatcgatattctcattaataatgccggcatcagcaaatttggcggtttcttagatctgtcagccgatgagtgggaaaatattattcaagtcaacctaatgggtgtgtaccatgtcacgcgcgcggtgcttccggaaatgatcgaacgcaaagccggagacatcattaatatttcgtctacagcgggtcaaagaggagctgctgtaacaagtgcttacagcgcttctaaatttgccgttctcgggttaacagagtctcttatgcaagaagtgagaaaacataatatcagagtcagcgcgttaacgccgagcactgtcgctagtgatatgtctatcgaattgaacttaacagacggtaatcctgaaaaagtgatgcagcctgaggatcttgctgagtacatggtggcacaattgaaattagatcctcgtattttcatcaaaacagcgggattatggtcaacaaatccttaaaaatgaaaacctgtctttcgacaggtttttttatttgaatgaaattcataccggcatatgcaaatctgacaatcgttttaaattgaagctggcagtgaatgtaggctataatagaactaagaaaactatgtaccaaatgttcagtcagaatttattttttccgctacacctataatcagtaaacatgaaataactggactatcagtctttaatataaagaaggaaaacaataaaagaaaattgaatatttagtacatagtgttgtcagtgacagaagaaggagtgcatatgatgaaagaagaaaaaaggagttcaacaggctttttagtgaaacagcgcgcatttttgaagctttatatgataacgatgacagagcaagagagactctatgggttaaagctgcttgaagtacttcggtctgaatttaaagagattggttttaaaccaaatcatacagaagtataccggtctttgcatgagcttcttgatgacgggatactaaaacaaattaaagtaaaaaaagaaggggctaagctccaggaagtcgtcctctatcaatttaaagattacgaagccgccaagctatataaaaaacagctgaaggtagagctggatcgctgtaaaaaactgattgaaaaagccctctcagataatttttaatagaaacaaacacccggcgcagcagtgtgaaccgggtgttttctgcttttcattatacatatttgtcgaaaagaaacaatacaaatcaatgatgaccttcaaacttgacatcatttcctcacgtggtaacattttaaacgtgtgaaaatgcgaacaaaaaagcgaacaaaggagatgttaccgatctttgatcaaaagaaagtagcctttataggagcaggatctatggcggaaggaatgatatcaggtatcgttcgtgccaacaaaatcacgaaacaaaacatctgcgttacaaaccgcagcaatacagagcgattaactgaacttgaacttcaatatggcatcaaaggcgccttgccgaaccaactatgtattgaagacatggatgtgctcattttggcaatgaagccaaaagacgccgaaaacgctctgtcatcactaaaatcacgtattcaaccccatcaattaatattgtcggtccttgccggcataactacctcttttattgaacaatcattgcttaatgaacagccggttgtcagagtgatgcccaacacttccagtatgattggcgcttctgcaacagctattgcccttggcaaatatgtgtcggaagacctgaagaagctggccgaagcattgctcggatgcatgggcgaagtctatacaatccaagaaaatcaaatggatatattcaccggaattgcaggcagcggccccgcgtatttttattatttaatggaattcattgaaaagacaggcgaggaagcgggcctcgataaacagttatctcgaagcatcggcgcacagacacttttaggtgccgcaaaaatgctcatggaaacaggagaacatcctgagatcttaagagataatatcacgtcaccgaacggaacgacagcagcggggctgcaagccttgaaaaaaagcggcggcggagaagcgatttctcaagcgataaagcatgcggctaagcgttcaaaggaaatcagcgaagatatcgaaaaaactgcagcgccgctatcaggagtgataaagtgacgcctgatacaagcatgaaaagagtcgttgtgaagattggaagcagttcattaacaagccttcatggagaaatcagcattcgtaaattagaagcgctggtcgaccaggtcgtcaaactcaaagacgccggaaatgaagtgattttggtttcctcaggcgcagtggcggcgggatatcggaagctcggatttatccaaaggcccgagaagcttccagaaaaacaagcatcagcttcaatcggccagggattgctgatggaggcttattcaaagctgtttttggcacacggctatgtcgcatcccaaattttaattacgagaagcgatttttctgatgaatatcgatacaacaatgtcaggaatacaatgaatgtactgctcgagcgcggcatcatcccgatcataaacgaaaatgacacagttaccgtcaatcggctcaagtttggcgacaatgatacgctcgcagcaaaagtcgcaggattgattgatgcagatatgcttgtgattttatcagatatcgacggattatatgacggcaatccgcgcacaaatccagaagcgaaaaggatacagcgggtgagtgaaataacacctgacatcgaagcatgcgcaggtgacactggaagcatcgttggcaccggcggcatgcgctctaagcttgatgcgtttaaaatcgtaatggcgtctggcattaaaggtttcctaggtcaggcagatgtcggcgatattttatatcacgccgttcatgaacaggcggaaggcacctattttgaagcagaaggaacgcttccgttgaatcaaaaggagcaatggatcgcttttaattccggtccggaaggtgaaatgattttatcagatgattgttcacgaaaaataacaaacggccaatcgagtttatacctagacggtgtacagaagattaaagggaaatttaaaagcggttcagttgttcggctaatggattcaaaagggacggaaatcggccttggaatcgtcaattactcttctgtacagcttcaagaaccggaaaagaacaaggaactgacaaacagagctctaattgatcaagaagcatttgtttgccatgtggatttttctttacctgtaaattaatttgcagaaaaaaacccgaagcttctatatagaagctcgggttcattttttttattgatactgctccagcttagagaaaaattgaatgacaaactcataaaaatcattcgcggaaggcgcaagctctctatttttcggtttaatgattccgacagtccgttttacttgagggaactcaattggaattttcacagtaaaacgaggtgttgtttcagcaaaagtactttcaggcagaagggtaacgcccattcctgcggacactaaccctttgatcgcatccaaatcctcaccctccgtggaaacgagaggagcaaagcctgcttgtttgcaagtatcgattgccatctctctaagtacaaatccttccgggaacaatacaaattggtcgttgcgcaaatcaattaaatgaaccgttttttgtttagcaagcggatgatttaatggaacaagcgcgtaaattttttcagtaaataatatttttcccgttatgtcagagaaattcgtcggcaccggtcctaataaggccagatcaatatcgcggtttctgacagcttcaatcagaaacttataggagccttggcgcagcaaaaattcgacgtgcggatattcttctttaaacgctgaaatgacagtcggcaaaagctggctggcgaggcttgtaggaaagccgatctttaccgttccgcgatgcgggtcaagatactcatcaatttgctctttcgcataatcaatggctttcatcgccgttttcacatgaatcaaaaattcttttccgattggcgtgagtttgatatttctcccttcacgctcaaataaggtcacatttaattcttcttcaagattggcaatttgtctgctgattgctgattgggccacatgcaaatgatcagcggcttctgaaacgtgttctctttcagccacctccatgaaataacgcagttggcgcagctccatgtttgtctcacatccatctatctcattttgagattcttttgatctaaattatatattgtttatatcgttttgaaaacctacaatgattatagagttgttagattttatgaccggtattatcggaaattgatcgggggagaggaattatgacgtacaatcaaatgccaaaagctcaaggtctctaccgtcctgaatttgaacatgatgcatgcggaatcggcctatatgcacacttaaagggcaagcagactcacgacattgtcaaacaaggacttaagatgctttgccagctagatcatagaggagggcaaggcagtgatccggatacaggagacggagccggcttactggttcaaatccctgatgctttctttagaaaagagtgcaaaaacatcaatctgccagaaaaagaacgttacggggtaggaatggtctttttctcacagaaggaagatgaaagaaaaaaaattgaaaagcaaatcaatgcactaattgaacaagaaggccaagtcgttcttggatggagaaatgtacctgtaaatgtcggaaaaatcggaacagtggcgcaaaaaagctgtccgtttgtccgtcaggtatttatcggcgcaagttctgatctaaaggacaatttatcttttgaacgaaaattgtatgtcattcgtaaacaggctgaaaattggggagtaacggaaggtcttgatttttattttgccagtttttcaagccagaccattgtttacaaaggccttttaacacctgaacaggttgatgcattttattctgatctgcaagacgaagcattcgtttctgcttttgcgcttgttcattcacgcttcagtaccaatacattccctacatgggaaagagcgcatcctaaccgctatttggttcacaacggtgaaattaacacccttcgcggaaatatcaactggatgagagcacgtgagcaacaatttgtttctgaaagcttcggtgaggacttaaacaagattttgccgattctcaatgctgatggcagtgactcttccattttggataacgcatttgagttttttgtgatggctggacgcaaaccggcacatacggcaatgatgctcattccagagccttggacggaaaatacgcatatgtccaaggaaaaaagggcgttctacgagtaccatagctccctgatggagccttgggacggaccgacagctatttcatttactgacggtaaacaagtcggggcgatccttgaccggaacggtctccgtccggcccgttattatgtcacaaaagatgattatattattttctcatctgaagtaggcgttattgaagttgaacaggagaacgttttatataaaaaccgccttgagcctgggaaaatgcttttaatcgacctggaagaaggccgtattatctccgatgaggaagtcaaaacacaaattgcaactgagtatccgtaccaaaaatggcttgaagaagagcttgtacaagtaaatcctgatccggagtcaagagaagaagaacaatttagtgatcttcttactcgccagaaggcattcggatacacatatgaggatatccaaaagtatctaattcctgttattaaagaaggcaaagatccccttggttcaatggggaatgacgctccgcttgctgtactttctgaccgagcgcaatcgctgtttaactactttaaacagctgtttgcacaagtaacgaacccgccaatcgacgcgattcgtgagcagcttgtcacttcaacgatgacttggctcggtgcggaaggcgatcttcttcatccaagtgaacgaaatgttcgccggattaaactgtatacacctgttttatccaatgaacagttttacgcattgaaaacgattgttcatcctgatttaaaaagccaaaaaattgatgtgctgttttcagaggatcttgaacgcggtttaaaggacatgttcacacaggcagagaaagccatcagccaaggcgtaagtttgttaattttatcagacaaaaagatgaacgaacgactgacaccaattccgccgcttctggcagtaagcgggctgcaccagcacttaatccgcaaagggctgcgtacgaaggtcagcattattgtggaatcgggagaagcacgtgaagtgcatcactttgcagcgttaatcggttatggcgcagatgcgattaacccttatctcgcttatgcgacctacaagcaggaaattgatgaaggccgtttggatatcagctatgaagaagcggtcagcaaatatggaaaaagcattactgagggcgtcgtaaaagtgatgtccaagatgggaatttcaactgtgcaaagctacagaggcgcccaaatctttgaagcggtaggaatcagccgcgatgtgatcgaccgttatttcacaggtactgcatcacagctaggcggcatcgatttacaaacaattgcagaagaggcacagcgccgccaccgggaagcgtatcaggatgattacagcaaaacgcttgaaccgggaagtgacttccaatggagaaatggcggagagcatcatgcgtttaatccgaaaacgattcatactttgcaatgggcgtgccgcagaaatgattacaatctgtttaaacagtatacaaaagcggctgatgaagaacgcatcggatttttgcggaacttgttcgcatttgacggaaaccgcaagcctttgaagttggaggaggttgaatcagctgaatcgattgtcaaacgttttaaaacgggtgcgatgtcattcgggtccttgagtaaggaagcgcacgaagctttagcaatcgcaatgaaccgtcttggaggaaaaagcaacagcggtgaaggcggagaagatcccaaacgctttgttccagatgagaacggcgatgatagaagaagtgcgatcaaacaaattgcatccggacggtttggtgtcaaaagccattacctcgtcaatgctgatgagctgcagattaaaatggctcaaggtgctaagccgggtgaaggcggtcagcttcctggcaacaaggtatatccatgggttgccgatgtccgcgggtcaacgccaggtgtcggattaatctcacctccgccacaccatgacatttattcgattgaggatttagcccagctgatccacgatttgaaaaatgccaaccgtgacgcaagaatcagcgtaaagctggtgtcaaaagcaggtgtaggaacaatcgctgcaggtgttgccaaagcgactgcagatgtcattgtgatcagcggctatgacggaggtacaggcgcttctccgaaaaccagtattaaacatacagggcttccgtgggagcttggccttgcagaagcacatcaaacactaatgctgaacggacttcgtgaccgtgttgtattagaaacagacggaaagctcatgacgggccgcgacgttgtgatggctgccttgctcggcgccgaagaatttggtttcgcaacggctccgttagttgtactcggctgtgtcatgatgcgtgcctgccatttggatacatgccctgtcggtgtagcgacacaaaatccagagcttcgcaaaaagttcatgggagatcctgaccatattgtgaactatatgctgttcattgccgaagaagttcgtgagtacatggctgcgttaggcttcaagacatttgatgaaatgatcggccgcactgatgtacttcatgtaagtgaacgggcgaaggggcactggaaagcaagccagcttgatttatctacacttctttatcagcctgaaggggtgcggacattccaagctccgcaaaatcataaaattgatcaatcgcttgatatcacaacaattctcccggctgtacaagaagccatcgaatctggaaaagaagctgatatttcgattgaaatcaataatacaaatcgtgtagccggaacgataaccggcagtgaaatctcaaagcgttacggagaagaaggtcttcctgaagatacaatcaagctgcactttaccggatcagccggccaaagctttggagctttcgttcctaaagggatgacgctttatttggacggagactcaaatgattacgtcggaaaagggctttctggcggaaaaatcatcgtcaagtcaccagaaggattcaacactgcttcggatgacaatgtcattatcggcaacgtggctttttacggtgcgacaagcggagaagcatatattaacggacgtgctggtgaacgctttgccgttcgaaacagcggtgtgaacgtagttgtagaaggcatcggcgaccacggctgtgaatacatgactggcggcagcgttgtcgttctcggtgatgtaggcaaaaactttgcggcaggtatgtccggcggaatcgcttatgtactggccgaagatgtcaaagcgtttaaacgcaaatgcaaccttgagatgattttatttgaatcattagaggacgagaaagaaatccagcaaatcaaagcaatgcttgaaagacatactgcatatacaaacagccaaaaagcagaagatttgcttgatcaatgggaagacagtgtgaaaaaattcgtcaaagtcattccgaaaaactataaacaaatgcttgcaagcatccaagagcaaaaagctgcaggtttatcagatgaagaagccatcatgttcgcttttgaggccaacacgaagccaaagcagaatacagcagcatcgggacaaaaacaagcggtagtacagtaaggaaggggagaggaacatggggaaaccaactggatttatggagatcaaacgagaaaaacctgcggagcgggaccctctcactcgcttaaaggattggaaagaatattctgctcctttttcagaagaagcatcgaaacggcagggggcgcggtgcatggattgcggtacaccgttttgccagatcggtgcggacattaacggatttacatccggctgtccgatttacaacttaattcctgaatggaatgatcttgtctaccggggcagatggaaggaagcattggaacgcctgttgaaaacaaacaactttcctgaattcacagggcgggtatgtcccgctccttgtgaaggatcatgcactttagcgatttcagacccggccgtatcaattaaaaacatcgagcgaaccattatcgataaaggatttgagaacggctggattcaacctagaattccaaaaaaacgaacaggcaaaaaagttgctatcgtcgggtcgggcccagccggactggcgagtgctgaccagctgaatcaagcgggacattccgtcactgtttttgaacgagcagacagagcgggcggccttttaacatacggcattccaaacatgaagcttgagaagggcattgtagaacgccgaattaaattgctgacgcaagagggaattgattttgtcacgaacacagaaatcggtgttgacattacagctgatgagctaaaggagcaatttgatgctgtgatcttatgcacaggcgctcaaaaacagcgggacctcttaattgaaggacgcgactcaaaaggagtccattacgcgatggactacctcacacttgcaacaaaaagctatttagattctaattttaaagacaaacaattcattgatgccaaagggaaagatgtcatcgtaatcggaggcggagatacaggagctgactgtgtggctaccgctctgcgtcaaaaagccaaaagtgtgcaccaattcggcaaacacccgaaacttccgccagcccgcacgaatgacaatatgtggcctgaacagccacacgtctttacgcttgaatatgcatacgaggaagcagaagcaaaattcggaagagatccgagagaatactccattcaaacgacaaaaatggttgcggataaaaacggaaagctgaaagagcttcataccatccaaatggaaaaagtgaaaaatgagcatggaaaatacgagttccgcgagctgcctggaacggaaaaagtatggcctgctcagcttgtctttatcgctatcggctttgaaggcacagaacagccgctgttgaaacagtttggtgttgattctgtaaataacaaaatcagtgcagcatatggggattatcaaacaaatatcgatggtgtattcgccgcaggggatgcaagaagaggccaaagcttaatcgtatgggcgattaatgaaggccgtgaagtggcgcgtgaagtggatcgatatttgatggggagttcagttcttccgtaaataaaggggattacatataagagaaaccggtctggctgccagccggtttctttttttattccattacgatcccgatgtttccaaactgtctgccttcctgcattcttttatatgcttcacatgctttttctaaaggatatatccggtcaattacaggccgcagcttatgtttgtcaatgaaagcgagcataccttgaaattcctcaccgcttcccatcgaggttcccaaaacattgacctgaggaaagaataaagaacgcaccggaaaactgagattatcccctgagcttgccccaaagctgacaatacggccatttggttttacatggcggaagtattccgaaaagagggcaggtcctatgctgtcaagaacaacatctatcttttttccctgcaactgctcatcccaattgctgtagctgtcaaatgcgtaatcagcacctaattgcagcgccctttttcttttctcctcactgcgggaggtcacgcttactgttgccccaatcgctttagccatcaataaagcgtaggttgcaaccccgcttccgatgccgggtatcaatagttgctcgcctttttttaattgcccctttgtaaacaaggcccgatatgcggttaaagcggataaaggtagaacgcccgcttcttcccaagataaataagcaggttttttgattgcattttgtgaaggaatgatcacatattcagcaagtgttccgtccgaaggacctcccagaatctcaggtacaggtggtacattctctgtcaaatcccagttcaatgtcgggaaaatgactacttctgtctgaacagtaacatttttcacgccttcaccaatctcttcgatgatacccgcgccgtcagaacccagtatcatgtgaggatcttgttcagatttgtttttcataagaaacaagtcacgatgattcaggcctgcagatttcaatttaacctttacctctccgtatccaggctttgttgatggaacgtcctgaactgataaccccagaagaccggcttttccgttgtgaattacagctttcatgctgtctgcctcctcattgaattgtattttcatatctttacatattttacatagcggttttcttcgagtaaaatgaacaaatatgatagccaatatcacttttcatcatagcaagcaggtgagagcgcgtggaaagcggagatttaaaaatttttcaggctgttgctcgcgaaggaagcataacgaaagcagcccaaatgctgaattatgttcagtcgaatgtgacagccagagtgcataagcttgagaaagatttgaatatcaggctttttcatcgaacgaatcgggggatgaagctgactgctgcaggagaaaatcttttacaatatgcagatcaagtattatcgctgttagaccaagctgaaaaatcgacccgaatgagcaggcaaccaaaagggcctttgcggatcggatcactggaaacgacggcggtaacgcatctgcctgagcatgcagcatccttcctcaggcgttttcctgaagtggatttatcagtgaacacagctgatacgcatcatttgattcaacaggttcttgatcataaagttgatggcgcttttgtatatgggccggttgagcacgctgcagttagacaactccatgtctcccatgatgaattagttttgatttcatcacgagaagggacggcagaagacatgcttcagcagccgatgctcttttttggggctggctgttctcatcgtgacagggtcaaaagattactagaggaagcaggcatacacaatcaaaaaatcatagagtttggcacattggaggctattataaaaggtgtttccgccgggatgggtacggcgctgcttccaaagtccgctgttgactgctccgagcatcgtacaaatgtatggattcatcaattgccaccagcatatcaagacttagagatcgtctttatatacaggaaagacttttttattacgagtgcgtttcagacatttcttgatgagataaacgaaatgaaaagatgaagatagacgtgcattagcagaataaagattttgtcaaagaagcagtcatcattctgtcattttggattgcaatcagggatacagagcattaccaatgcccgttgttataaagatctgcatgaaaaaactgtactcatttgaagcgagtacagttttttaatttatttacgttttaaattaatgccgatcgccgcgccgtttctgcttgaatcagctacgcctttaaaggttccgttttcatggtcgatcgatatgctttgcacgtttccgatatccaccggacttgtgccgaatttgtggcccataccgttcagcttgctgaggacatctttaggaactccgtcttcgtaacggtaagagctcatactgtttgtgtaaattctcggctcttcaacagctgcttttaattccataccatattcaatgtggtagagaatggtttgcaaaacggatgaaataattgtggccccgccaggagatccaacagtgaggacaggcttgtcatccttaaataaaatcgtcggggtcatgctgcttaaaggccgtttgtttggctgtacttcgttagctccgcctggtatcgcatcaaaatccgttaattcattgtttaaaataacaccgtaatcagggaccataatacccgttccgaatagctgttcgattgttgttgtgtaagaaacaacatttccccatcgatcagcaactgtaaagtgggttgtttggccttctactttgtctttcggctgttcaacttgtttatagtttgctgatccttcttggtatttccaagggtcaccggctttcggttttttattcacttgatctaggttgattaattgctggcgttctttaatataatcgggatgaagcaggcctttgagaggaacatttacaaattcgggatcacctgcgtaagacgcacggtcggcatatgacaaatgcatcgtttcagcaagcagctgatatttttcccatgagcggacatcgtattgtgaaaggttaaaatcatcaaggatttttagcatttgcaataagaaaataccgccggagcttggaggaggagtagtagcgatttgatagccttgatagtctccccaaatcggttcatcaatcgtaatgtcgtaatattctaaatctttttctgtcattgatccgccgaaatcctggacagtgtcagaaagcgtcttagcgaattttcctttataaaaagcgtcagtgcctttggagcgaataagcttaaatgttttagccaaatccttttgaataagggtatctccttctttaagcggttcgccatttggtaaaaatacatcttttgcggcagtccgtgaaagcttttcctgataatcagaaatggcatctgccaacaccgaatcaatcggaaagcctttttcagcgagtttaatagaaggggtaattaattgcttcatcgaacgggttccccatttatccaaggcttcttccagccctttcagagtgcctggaacaccaacggcagtaccttttgttacacgttcagagaaaggaattgctttgccgttttcgtccagaaacatatcaggagttgcgcctgctggagcacgctcacggctgtcgattatcgttgtatccttcgtttttccgtcatacaccatcataaaaccgccgccgccaatacctgacatcattggctctgttacattgagtgcaaattgaatggcaaccgctgcgtcaatagcatttcctccttttttcagcacatcagcaccgatttcagaagcaagaggatgtgcggtcgcaaccatgccgtcttttccaacatctacttgtttgtactcatcgtagcttttgggcggttttttagcttccgcgtgaaaagggacacttccagcgactaacagaacactaagcagagctgttaaacagacgttccacgttcttttcatgttctccctcctatatgaagctgtattgttacaatcttagcgtaaaaaaattacagcgttttcacaagtgacaaatggtatattatatagtacataaagccgtttttctgtgcaaaattgattatattgatatgagccatgtgctatattagaatcagcatacggattaagaagggactgctatatgtatttaacgattgaagaaacagcagaatatacaaatctttcagaggattatattaaaagcttggtgctcgaagggaaaatcagagccgttcatgacggggagcaatttttgatttataaggaacagttcaaaacgcatctcgaacagctggagaattacaaagcactggtgcaggaaatattaaatgaaccgatcccggaagatattgatgtaaaggatgaggattaggacacaatttgaaattgtgtcttttttttgtatatttttgcggaagctccagaaaatcgggagtgtcagatttcgttttaagaggttttttgatgattagtagggggataagtatccaagaggttaaaagctttataagaggctttaaagcttattttatagggtggaggtttgaagaagctactttaaaagattatgtaacactatgtatattatgttacataaatgccgccgcactttgacattcaacgtttttcagctataatagtaacatagacctcaaaacgttacataacggtttttaaggagttttttgatgcatattgtacagccgattcgcagtctagagaaaatccaagaagtcaaacagtatttgcttaacaaaaacaagcgggattattttctgtttattttcggcatcaacagcgcgctccgcatttctgatattctgccgctgcaagtgaaggacgttcaaaataaagatcatttatgggcgactgaaagcaaaacgaaaaagaaaagaaagattcttattttagaatcgctgaaacaggaaatatacgagtatacgaaagacatgaaggaaaacgaatatctttttaaatcagtgcggaccaggaagccgatttcccgcattcaggcctacagaattttaagagaggccgctgcggcgtgcggacttgaggagatagggacgcatacactccggaaaacgtttggctatcatttttatcagcgaacgaaagacatcgccgagctgcagagaatactgaatcattcatcaccatcaattacaatgcggtatatcggtattgatgaagatacgacaagagccgcatataaggtttttggagggctttaatacaaatcgcttgaaaatattgatcatcagagctactatataaataccaaaagctctagtagcacagcggatagtgcagcagtttcctaaactgcaggtcgggagttcgaatctctcctagagcgttatattcacaaaaagacaacaggcacttttcgcctgttgtctttctttatgcaaaccaaataaaaaacgcccgcttataccgggcgtttttcttatataactgcgtcaaattgattgactttccattttttattttctttcacgaatgtcactttccgttttacagaaggggatccgtctaatgtagggacggtaaattcgtatgtgattgtgccgccttttttagagaccagtttagcagttgattttttccaattcaaaagattgtctccgtcaccgattggaacagcaagttttcctttagaaacagtgaaatgataatctttaaagcctttttcgattgctgtttttgtaaaaataggagttaagtaattcaccgcttttgctttagtgcctagatcactgcacatgtatacatattgaagattttgatactcgaatgtgcctgatgggcaaactgcttttttcacctttggattgtggccgctcatggtgttccaaaaatgttctctagcggataatgccaactgtaatgcttgtttttgtgataaatcgcctgatgtatttttcgcaaatgcatttgtgcttaatgacagaataagtgcaatggttgttagaaatagaagacattttttcattatcgctctctccttcaaaatctctttctcttatgttacaaatgttacaataattacggatagattacaatacttttgcataaattattttttattcttttactcacaaaaaatacgccattacttgctagtttattcttcataagctaaaaagatgtgtaaaattagaagaatcgggaagggtttcatatgtgcagtgatgaataataacatgttacatatcctgtttttgtcaaaaaatgagggcatgtttaaaaacgatttcaaataaaggagtcctttaatatggaaacatcacaagaacctcttgtaactcaaaagaaaagcaaaccatcagtttggcggtcgatgtcactctttttagtgccgcttctgctgagcaatgtgctgcaatcagtcggccagctagtcgggatgatggctgtaggcagatggctcggtgttgatgcagtggcagctgtatcatcctttttcccgttattttttcttttaatctcatttacgattgggatcggttcaggaagttcgattctgatcggacaagcttacggagcgaaaaatgaggaacggctaaaggctgttgtcgggacgacgctcacgtttacatttttattaggcgttgtgttagccgtcatcggcagtattttcaccctggatatccttcgtttaatgggtacgcctgaaaatgtcattcatgtcagcgctaactatgcacgtattttattttatgctatgccgtttatgtttttatattttgcatatactacctttttgcgcggaacaggagattccaagacaccgttttatacgctgattgtgagcacggttatcaacatcgcgcttttgcctgtcttaatccttggcatgtttggttttccgaaactgggcatatacggctcggcatatgcaactgtcatttctacgattgcgacttttctcgtgttaatggtgtatttacgaaagcgaaaacacccgctgcaatttgataaaacagtgcgtcgttatttgacaatggataaggaactgctggttctcctgctgcgtcttggggtcccagcaagcatcaatatgattcttgtctcattatcagagatagcggttatttcattcgtcaatcattacggctctaatgcaacagctgcatacggagtggtcaaccaggtggccagctatgtacagatgccggccgtcagccttggtattgcggtttctattttcgctgcgcaatcgatcggagcgaacgagtttgaccgcttaaagcaggtcattcgcgtggggatttggctgaattatatcattggcggcgtactgatcattctgatctatgttttttcacatcagattttatcgttatttttaaccgagcaagagacgctttacattgcgcaccgtcttttgatgattacattgtggagctatttgctgtttggaaatgcccaaattatttctgcaacgatgcgggcaagcggaacggttttatggccgaccgtcatcagtatttttgcaatctggggagtagaggtgcctgtcgctttcgtcctttctcactatacaaagcttgaaatactcggcgtctgggttggttatccagctgcgtttgccgtcagcttgctgttgatttatgggtattatcaattcgtctggaaaaagaaacaaatcacacgtctcatccaatagcctccgaatcacaccgttcataagttgaacggtgtttttttatttgataggggaaaatataaaatggaggaaatatggtacagtacattgaattcttatactagcaatgaatcaaggagaggttgagtaaacatggcaaactttattgagaaaatcacgtatttgggaacgccggccatcaaagcgggcaacgaacatctagaaatgattgttgtccctgagtgggggagcaacgtcatttctctcgtggacaaaacaacaaatgtccagcttttgcgtgaaccggaaacagcagaaagttttcacgacacaccaacattgtatggcattccaatcctgttcccgcctaaccgcataagtgacggtacattcagtttccggggcagaacgtatcattttgatatcaacgagaaggataaacacaaccatcttcatgggtttctttaccatgaaaagtggaatgtcgtgaccacgaagcaaactgatgaaggagtgattgttgaaacagaaattgatctttctgagcttccccatgtgcagaatcaatttcctcatcatgccgtcgttcggatgacatacacgatcaaggggaataccctatttaaacatgcgacggtcatgaacaaaggaaaggaagcgtttccttggggaattgggtatcatactacatttgtgtttccggcagaaagctcgttattctccctgacagcagatcagcaatgggagttggatgaacgcctgctgccgaccgggaaactgatggatgtaccgaataaagaagctttgcatgaaggaatggatttgcgccacaagcagctggatgatgtctttttatcttcctatcagaagaggggcggagaaaaccaggcagtcatttatcatcagcatgcacatatcagcattatttataaggcagatgaacattttaaccattgggttgtatacaatgcggacggaaaacaagggtatttatgccctgagccttacacatgggtgacaaacgccgtgaatcttgatttaccttcgtcactcactggtttacaagtgctggagccgggagaagaaacgacagctaaaagcagtatcaccattgaactgaatcatcaatagccaatgatgaagcgcagagaggcggggaaattaatgaaaaaaagcataaagctttatgttgctgttttactgcttttcgttgttgcttcggtgccttatatgcatcaggctgcgcttgccgctgaaaaacaagatgcactttccgagcagatcgataagattttagctgatcatcctgccctcgaaggcgcaatggccggcatcaccgttcgctctgcggaaacaggtgctgttctatatgaacattcaggagacacccgaatgaggcctgcctcttctctaaagcttttgacagcggccgcggcactttctgtccttggcgagaactattcttttacaaccgaggtccggacggatggaacactgaaagggaaaaagctgaatggtaacctttatttgaaagggaaaggcgatccgacacttttaccatctgattttgacaaaatggctgagaaattgaaacattccggcgtaaaagtaattaaaggcaatctgatcggtgatgatacgtggcatgatgacatgcgattatcacctgatatgccttggagcgatgaatacacatattatggcgcgccaatttccgctctaacagcgtctccaaatgaagactatgatgcaggcactgtgattgttgaggtcaccccaaatcaaaaagaaggggaagagcctgccgtgtctgtctctccgaaaaccgattatataacgataaagaacggtgctgaaacgactgctgccggttcagagaaagacctcacaatcgaaagagagcatggaacaaacacgattacaattgaagggagcgtaccggttgacgcaaacaagacaaaggaatggatttctgtctgggagcctgccggatatgccttagatttatttaagcagtcactaaaaaaacaaggtattactgtgaaaggggacatcaagacgggtgaagcacctagttcttcagatgtgctgctctctcatcgctcaatgcctttatcgaaactttttgtgccgttcatgaaattaagtaataatggacatgccgaagtgctcgtaaaagagatggggaaagtgaaaaaaggagaagggagctgggaaaaggggctcgaagtgttaaacagtacgcttccggaatttggtgttgattctaaatcactcgtcttaagggacggatcaggaatctcacatattgatgctgtatcatcagatcaactttcacagctgttatatgacattcaggatcagagttggttctcggcttatctaaattctttacctgttgcgggcaatcctgacagaatggtgggcggaacgctgagaaaccgcatgaaagacactcctgcacaaggaaaagtaagagcaaaaaccggatcgctcagtacggtaagctctctatcggggtacgcagaaacaaagagcggtaaaaaacttgttttctctattcttctaaatggattgattgatgaagaggatggaaaagatattgaggatcaaatcgctgtcattttggcaaatcaataatagcggcagacctgttttccaagagaaaacaggtttttttatgtctgtctttgtcgaaccttccaataattagaagaatgatgcacaaaagcaaattagttcgattaaaaagtagtgtataagaccttatgtaaaacaatacttttatcactttatatccggaaatttgataaaaaaagaaacgaaaaataaagaaataatactatattcaaaaaaatgttataaaaatttaatgttttttattgtactttaaaaaatatccgttaatatagtgcatatatggattatatagtcatataatttcttttattgtcatttttctgcttttttctactttttcttatcctcttattatgagaactggagggaatccgttgagcgaacatacttattctttaacccatgcccaaaggagagtgtggtttaccgaactgctggagccagataccagcatttgcaatctcacagcctgtgtgaaattcaaaggcaatattgagcttgatactctggagggagcgctgaatcattccatctcccgcaacgacgccattagatttcagctgttagaaggagaagagcttgagccgcgattgcaccttactgaatataaatattatccacttagaataattgatttttcaaatgttgaaatgatagaaatagagcaatggattcaggatcaagcgagcattccatttaaactgttcaactcgcctctttatcaattttacctccttagaattgactctcatgaagtttggctatttgcgaaattccatcatatcataatggatggaatctctttaaatgtgatgggaaatcaaattatagatctttatcaaaaaatgaaaaagaaagatcctttacctgatcagccggaaccttcttacttgagctacatcgaaaaagagagtcaatatctacaatctccgcggtttgcaaaggaccgtttattttggacgcaaacctttgagcacccgttggaataccactcgttagccgaccagacgtccttacaaaaacagagcacatctgcatccagagacaccatcattctttcacctgatctagagcaaacgattcgaatcttttgcgaagcacacaagatcaatatcatttccttatttatggcttcattttacatatgcatcagccgaatcacttctaaaaaagatcttgccattggcacctactatggcaacagagggtcaaaggctgaaaaagaaatgctcggcatgttcgttagttctcttccaatcagaataacggttgatcctgacacagattttctttcctttgtccgcacaataggcagggaacagctttctgttatgcgtcatcaacggtttccttataatttgcttgtaaatgaattaagaaatgaacagaaggatttacacaaccttatcggtatatctatgcagtatcagccacttcagtggcacaatgcagatgattttgactatgaaacagcgctttatttcagcggatacaccgcgaacgagctttcagttcaaatacaagaacggatagacaatggaaccattcaattaaatttcgactatcaaaataccttgttttctcttgaggatattaaacgaatacaatctcatctgcttaccatactggaaaacgcccttaaacatccgcacagctttataagagaattagatatgacgaatacaagagaaaagcaaaaattgttgtatgagtttaacaagacggaagctgtttcgcctaaagctttcaccctgcatgggctgtttgagcgacaggcagctttcacaccggagcggctggccgttcgcttttcaggcggttcgctgacatacgctgagcttgatatgtacgccagccggctggctgcgcaccttgcggcacgcggtgtcacaaacgaaagtatcgtcggaatcctgtctgaacgctcacctgacatgctgatcgctgtccttgctgtcttgaaggccggaggggcgtatttgccgcttgatcctgcgtatccaaaggagcggctgagctacatgctgaaagacagcggggcatcgctcttgctgacacagccgggatgctccgcaccaaacttttctggcgaaatgcttgaagtggacatgacatctcttgcgagcgaaaaagcagaaaaccatgagtttactccagctgacggcggttcactcgcctatgtcatctatacatcgggctctaccgggcagccgaaaggagtggccgttgagcaccgtcaggctgtttcctttctgaccggcatgcagcaccagtttccgcttttggaagatgacattgtcatggtgaaaacctctttttcctttgatgcgtctgtgtggcagctgttttggtgggctctttccggtgcttcggcgtatctgcttccgcccggctgggaaaaagaccccggattgattgtacaagccattcatcaggaacgtattacaacggctcattttattccggctatgctgaacagctttctggatcaagcggaaatgttagcgctcggtgacgggacaaacctaaagcgtgtattcgccggaggtgaaccgcttgcgccgcgtacggcagcccgttttgcttctatcttgccgcaagtatcattaatccatggttacgggccgacagaagcaacggtagacgcggcattttacgtgttggatccagaaagggacagggaccgtttgcggattccgatcgggaagcccgtacccggtgcgcgtttgtatgttttagatccgcatttagccgtacagccttctggtgtcgccggcgaactgtacattgccggagcgggtgttgccagaggttatttgaatcggccggcattaacggaggagcgttttcttaaggacccgttttacccgggtgaacgcatgtacaaaaccggggatgtggcgcgctggctccctgacgggaatgttgaattcctcgggcgcacggatgatcaggtaaaaatccgcggctaccggattgagccgggagaaattgaagcggcactaagaagtatagaaggtgtaagggaggcggccgttaccgtacgtacagacagcggggagccggaattatgcgcttatatagaagggctcgaaagaaacgaagtgcgggcacagcttgagagactgttgccaggctacatggtcccagcctatatgatagagatggaacagtggccggttacgccaagcggaaagctcgaccgaaaagccctgccagctcctggcggagcggcagatgcgaagacctacacggcgccgggaaacgtgactgagatgaaactttctcagctatgggaggacgtgctgaaaaatggccctgtcgggattcacgacaacttttttgaccgcgggggacattccttaaaagcaacggcgcttgtctcacggatcgccaaagaattcgatgtacaggtgccgctaaaagatgtgtttgcccatcctacggtagaaggactggctacggttatccgtgaaggaacggacagtccatatgaagcaattaagctcgctgaaaaacaggaaacctatccggtttcctctgcccaaaagcggatttatgtccttcagcagctggaggacggagggacaggctacaatatgccggctgtgttagagctcgaaggaaagctcaaccctgaaaggatggacagggctttcaaagagctgatcaagcgccacgagtcgcttcggacctccttcgaacaggacgaaagcggcgatccggtgcagcgcatccatgacgaggtgccgtttacattacagactacagttctcggcgcacgaaccgaacaggaggccgcagcctcatttatcaaaccgtttgatctcagccaagcgccgctgttccgtgcccaaatcgtaaaggggtcagatgagcggcacctgttgctggttgatatgcatcacatcatttcagacggtgtttccgtcaacattctgattcgggaattcggcgagctgtacaataatcggaagcttccggcactgcgcattcaatataaagactatgccgtatggcaagaaggattcaaaacaggagacgcgtacaaaacgcaggaggcgtactggctgaagcagctcgagggcgagctgcctgtgctggatcttccggctgatcatgtccgcccgccggtgcgaagcttcgcgggtgacaaggtctcatttacgctggaacaagaggttgcatcaggccttcacaagctggcacgagaaaacggaagcacactgtacatggtgcttcttgcggcttacaccgcgttcttgtcacgcttaagcggacaggaagatatcatcgtcggctcgccaattgccggccggccgcacaaggatcttgagccgatactcggcatgtttgtgaacacgctggcgcttcggacacgcccggagggcgggaagccattcgcacagtatttgcaggaagtgcgtgagacagcattggaagcctttgagcaccaggattatccgttcgaagaacttgtcgataagcttgaattgacacgggatatgagccggaatccagtgtttgatgcgatgttagttgttcaaaataatgattacgagccattgtatcttcatgatttgcaaatgaagccggcacaagtttctcatctcgtttctaaattcgatttgacactacaggcatctgagggcgacggaaacattcatttcctttttgaatattcaaccgcattgttcgagaaaaccaccattgaacgctgggcatcgcatttaacaaatgtatttagcatcatcggcaaaaacccggaggtgacactcaaccatatcgacatcctgacccaagaagagcggcaccagctgcttaatgagtttaacaccgggcaagcgaatcaatacggagttcaaacaatcagtcaattgtttgagcagcaagctgctcgaacaccaaaagcttctgcacttgtcagcggagacaaaacactgacgtatcaagagttggacgagtggtccaatggaatcgcacgtgcattgcgcagcttaggtgttaagccggacacaccagtaggcatcatgatgcatcgttcgttcagtatgatagcatccatacttggtgtgtggaaagcaggcggctgttacgttcccattgatcctgaatacccgacagaacgcaaacgctatatccttagcgacagcggaacgaaactgctgatgacaataaatgaagcggatcggggagtacttgctgactttgaaggagagatcttaacgatagaaagtgtagaggcagacgacaaatcgccgctgccgcaaatgtcgtctgcccatcatttggcttatatcatttatacctctggaacgacgggccgtccaaaaggggtaatggtcgagcataaaggtattgccaacactcttcagtggcggcgaaacgcttatgcattcaacgagacagataccattctgcagctcttttctttctcatttgacggctttataactagtatgtttacaccgcttttgtcaggtgcaaaagccgttttgcttcatgaagaggaagcgaaggatattctggccattaagcatcagctgtctcgtcagcggattacacatatgattattgtgcctgttttatatcgagcgcttttggacgtagtgcagccggaagatgtaaagacgcttagagtcgtcacactggcgggagaagcggctgaccgcgaattgatcgaccgcagcttagctatatgtccgcataccgaactcgccaacgaatatggaccgacagaaaacagcgtggcgactaccgtcatgagacatatggaaaagcaggcatacgtaagcatcggccagccgattgacgggactcaagtgctgattttaaatagcaatcatcagcttcagccaatcggtgttgcgggagagctttgtatagcaggaacagggcttgcaagagggtacgtcaatcttccagaactgacagagagagcattcacgcagaatccatttaaacccgaaacacgaatgtaccgaacaggagacgccgccagatggatggccgacggtacactcgaatatctcggaagaatcgatgatcaagtcaaaatcagaggataccgtgtagaaacgaaagaaattgaatcggtcatccggtgtataaatggtgtaaaagacgccgcagtagttgctcatgaaacagcgtcaggacaaaccgaattaagtgcttatgtggtggcaaaaccagagttgagcacaaatgctgtacgctcagaattacaaaacaagctgccggtgtttatgcaccctgcgtttattgaaaaactggactcacttccattgtcaccaaacggcaagctggatcgcggagcacttccaaaacctgtatacaaccacgaaggtgaacgtccattcctcccgccagccagcaaaacggaacaaatactggcagatatatggaaagaagtactgggggcagaaaagatcggaacagctgattcgttctttgaacttggtggagattcaatcaaagcgttacaggtatctgcgcggcttcaccggttaggcaagcaaatggcagtgaaagatttgtttagccatccgaccattcaagaattggcagcttatatccgtgattcagatacaagttccagccaagctgcggttgagggagacgtacaatggtcgcctgttcaaaaatggtttctttctcaagatataaaagaaaaacaccattttaatcagtccgtaatgctgcatcgaagcacctctgtacaagaagacgcactgcgcaaaacgttaaaagcaataacgtgtcatcatgatgcgctgcgaatggtgtttacacagaatgaacaaggaaagtgggatcaatataatcggccgctcagtcattcggacgacgcgttgtacggccttcagatgattgatttatcagctccggacggcactgatggaaatagcacgtatgagcctattatcaaacgtcatgtacttgatattcagcagaaaatggatttgaagaatggtccgctgctgcaagccggtcttttccacacaattgacggtgatttcttatttttatcggctcatcacctcgtcgttgacggcatctcatggcgggttctgcttgaagatttggctttagggtatcgccaagctgcaggcggggaagagattcagctgcctcctaaaacaagctcatttaaagcgtatacgaaaaagctctctgactacgctgaaagccagcagctaatgaaacagctcaagtattggcgcgaagccgaagagtatcaaacagaggcattgccttttgatcacatcgatggcactagagcagacgagggacaacggtccacgatttcgtttaccttaaacgagaaagagacagcagcactcttaaaagacgccaacagcgcatataacactgatacgcaggacatgctgctcgcttctgtcattcttgcgctgcgccattggaccaatcaatccgccttcaaactatcattagagggccacgggcgagaggatgtattagaaggaatagatgtgagccggacggttggatggtttaccgccatttatccgttattggttaaattgaacgcagacttgccagattcggaagaatacatggttcatgtgctaaaaacaacaaaagatacactgagacgtgtacctgacaaaggattcggctacggtgtcatcaaatatttgacgccgcctggcaaaaaagacatcaatttcacaggtgcaccagaaatcagctttaattatcttggtcaatttgaaagcggccgctcagctgaagtacctgaggaggacgccttctcattctctccgcttggtgccggaggtgatatcagcacaacatggaaccgtgaacagtcgctggatatcagcgcaatcgctgcagaaggaaaattgactgtcaatatgacttatgacaatgcccgctttcagcgcaaaaccatcgaacagcttagcgaaacatgccgtcaatttttattacagctgatcgaacactgccagaacaaaagagaaacagaaaagacgatcagcgattatgatgatcaagaactaaccgaggacgccctgcaagagattgctgatatgctcagttttcactaatgaaaccgtgaagaaaggtgcagacactatggataacatcaaaaaaatcaagaacatttatcctctgagtcatatgcaggagggaatgctgtttcattccttcctccgtaaagaggagggggcatacgttgagcagtcgctcttcaccattaaaggaagcctcagctatgaatggtttcagcgcagcattcaagccattatcgaccgccatgatattttcagaaccgtgtttttgccgaggtcccgcatttgtcgggacctcggcaagtcgtgatgacagaacgtgaattccatttgtacagcgaagacatttcccatctgccaacaaacgatcagaatgagtatattgaacgctttaaagagaaggacaagcaaaaaggctttgatctgcaaaaagacatgctgatgcggatttctctattcaaaacagctaaagatgaacatgtctgtatctggagtcaccatcatattttaatggacggatggtgcctaggtattgttatgcaggaatttatgcaaatttatcaatcgattcatgcaggaaggccgctttcattagaccctgtccgtccgtacagcacctatatttcatggctgacaaaccgagacaaagaaaaagcagcagcctactgggatacctatttaaaaaactacagcactccatcacctctgcctcgtgtgtctgataaagaaacaaaagaaggttatcaccgtgaagatttgatattttcattaaataaaccactgacagacaagctgaaagagactgccaaacaacacggcgtcacgctcgctaccctaattcaggcggtctggggtgtgatgctgcagcaatataaccttacagacgacgttgtgtttggcgcagttgtatcaggaagaccgtcagaaatcccaggcgtggagcaaatgatagggttgtttatcaataccataccgattcgaattaaaacacatcaagacgaaacgtttcaagaactgctcatacgatgccagaaagaaatgctggaagctgagccgtttacctgccagcctttatttgatattcaggcaaacaccgcattaaaacaggaactgattgatcacattatcgtctttgaaaactatccgttacagcagaaaatcgccgattccgctgatcaaaccgattcaccgctgcaaatcgatcaagttcaagtatccgagcaatcaggatataactttaatcttgtcgttgctcccggcgaagagcttgtcgtcaagttcagctataatgcattcgtttacgatgctgcctggatcagctgtatcaagaggcaatttacgcaagcgcttagcacagcggcacagcaccctcatatgccaattgctgatttttcttttcttgatgcaacagaaaaagagcagattgtcacacagttcaacaatacaaaaacggagtatccaaagaatcatacaattatcgatttatttcgcgaacaagcagaaaagacgccagaccataccgcacttgtgtatggcaatatgtctatttcatataaagagcttgataaacgctctaatgcgctcgccagagagttaattcaaaagggatttcggaaaaacgagacagccggaatattgactgcacattctcccgaattcatgatcagtgtgcttgccgtattaaaagcagggggagcatacctcccgcttgatgaggagcttccgcctgaacgagtcagctttatgcttgaggaaacgcaagcaaaaatgctgattgttcaaaaggggctggagcaaaatgctgcgttctcaggaacatgtatgattgcagatgcgcaggcattgatgggagagaaccattttcctatcaacaccatctccagtccagacgatcttgcatatatcatgtatacctcaggatcaacaggccggccgaaaggggtcatgatcacgaatcgcaatgtcgtgtcccttgtcagaaacagcaattacacgtctgcgtccggtgatgaccggtttattctgactggatctatcagctttgacgccgtcacctttgaaatgttcgggtcacttttacatggcgcaagccttcatatcattgataaatcgacaatgctgacacctgatcggtttggagcgtatttgtttgaaaatgacatcacagtgctatttttaacgacagctctttttaatcagctggcacaggtacgagctgacatgtttcgcggactccatacgttatatgtcggaggagaagcactttcgcctgctctgatcaatgctgtcaggcacgcctgcccagatctcgcgcttcataatatttacgggcctacggaaaacacgactttttcaaccttttttgaaataaagagagactatgcggggccgattccgattggaaaaccaatcagcaatagcaccgcttacatcttagatacaaaaggacgtcttttgccaataggcgttcccggcgagctttgtgttggcggtgatggggtcgctaaaggctatttgaacagagatgacctgacaaatactgttttttctcctcatcctttcttgcctggagaaagaatttaccgtaccggtgatttggcacgctggctgcctgatggaaacttagaatacatcagcagaattgacaggcagatgaaaattcgcggaaaacgaattgagcccgccgaaatagaagcgcgcctgttagaaatggaaggcgttcaagaagcagcagtgacaatgagagaaaaagatggagaggcgcagctgtacactcattacgtcggtgatcataaaaaaacagatacggattttcgcgccgatttggcgcgtgtgcttccagactatatgatcccgcagcactgggtgcgtgtggagcggatgccgcttaccggaaacggaaaaatagaccgcagcgcgctgcctattccagaaaataagcctgccaaacgacagaacatcatattgccaagaaacttggttgaagaagaattggcgaacatttggaagcaagtcctcggtgttaacacaatcagtattgatgatgacttctttgctattggcggacattcactaaaagcactgcaagtcatacatacactaaaacatcagcagaacattgacataccgattgatttcttgttcgaacatccgacaatcgctcagcttgccgaaaaactttattctaaacagctgacagcggcagatgaacagcatgtgatcaaactgaaccagcacggcgcgcaaaatcttttctgcttcccgccgatatcgggatttggcatttattttaaagaccttgctttattactgaatgagaaggcagccgtatacgggtttcactttattgaacaagacacccgcattgaacaatatgttaattgcatgacggacatacagcctgagggcccatacgttttattaggctactctgcaggcggaaacctggcttttgaagtggcacaggctatggagcgcaaaggattagaagtcagcgacttcattatcgtggacgcttatctaaaagaacagcctttgcctattgataccgggaatgacgaatctgcagcatatctgcctgaagcagtcagagaaaaggtgatgaagaaaaaaagaaactatcaagaatattgggcacaattgctgaatgaagggcacatcaaagcaagcattcatttcatcgaagctggaattcaaatcgaaaccagcgagaatacaggcttaacgaaatgggaaggcgcctgtggaaactacagcgagtacacgggttttggcgctcataaagacatgctggaaggaacatatgctgaaaagaatgctgacatcatccttgacattttagaaaagatcacttcaaataaagcaatcccgcacaaacaatagaacagattcgcggacagaggcattctctgtctgcttctttttgtatcaaagaatggatcgatgacactagggaatgataacatcatcctttttcttggaggcttgtcatggatcatctatcttttcttacgtttatcatgctgattctagccagttacaggctgacacatttgattgtattcgacaaaatcacagaatttatccgaaaaccttttatgaaaaagaaaaggattgttgatcaaaacgggcatgtagatgaaaaaagcgtgccggcttctaactttggatacatgctcaattgctactggtgtgccggtgtttggtgtgccatcttgatcggacttggctatctttttttgcctcgtattgcaataccgctgatctttattttagccattgccggagcacaagcgatccttgaaacggctgtcggtgtcggcgtaaaacttattgacgtgttaaaaagtttgcaaaccatgatgaatgataaaaagtcctaaaagcggcccacaacatgctttaggacttttttcgtttatttagtgagatagacattctgttaatcacccttttatagcccgggaataccgtaatagcgaatagtgaaagtgatgtaatgggggagaagaaacagaatgaaggtttgccaaaagtcgattgtccgtttccttgtcagcttgatcatcggaacgtttgtcatttccgttccgtttatggccaatgcgcagtctgacagggagctgagagccgtatggattgcttccgtattaaatattgattggccgtccaaaaaagggttatctgtgaaagagcaaaaacaggagtatatcaaactgctggacgatgtgcaaaaaatgggaatgaatgccgttattgttcagattaaaccgacggctgatgccttttatccgtcagcttacgggccttggtcggaatacttaaccggtgtccaagggaaggacccgggctatgatcctcttgcatttatgattgaagaaacccataaacgaaatttggaatttcacgcgtggtttaacccttaccgtattacaatgaatcatacagatcttaataaattgtctgagagtcacccggcaagaaaacatccagattgggttgccgcctacggaaaccagctgtattatcatccaggcattccagaagcgagagattttatcgtcaaaggcattgaagaagtcgtaaaacattatgatatcgatgctgttcatatggatgattatttttacccttataaaatagcgggacaggaatttcctgatcaagcacagtacgaacaatacggaaaagacgctttttctaatatcgatgactggcggcgggacaatgtgaaccagcttgtcaaacaaatcaaccaaacaattaaagctgcaaaaccgtatgtcaaattcggcatcagtccctttggagtatggagaaacgcagcagatgacccgaccggatcgaatacaaaagcaggcgtcagaaattatgacgatctatatgcagacacaaggcgttggatccaagaaggcgacatcgattatattgctccgcaaatttattggagtatcggctttaacgcagcggcgtacgacgtgctggctgattggtggagcaatgaagtcaaaaataggcctgttcacttatatattggccaggcagcatataaaatcaataacaattttgatccgccttggtccgaccctgaggaatatgtgcggcaaatcactttgaaccgccagcttgaactggtgaaaggaagcatgcatttcagcctcaaggacctcaacaaaaatccgcttggcatcaaagaaaggctcagcactgatctttacagcaagccggcactggttccgcaaatgccttggcttgacaataccgccccaaaaaaaccgaagcttacgaaagtcaccgaagacaaaaacggcaatcttctgcagattaaagatcacccatcaaatctaaaaacgaaagaaacagcctattatgcgatatacagagccgaagggaaaaagcagagaacattgctggcaacgcaaagaaaaacacatgagcagcaaaccttcttagataacacggcagatcctaacaagaaatatacgtattatgtcacttcagcagaccggcttcataacgaaagcaaggcttccaaacgaacaacaaaataagaaatgagaaggacggctttctaagtcgtcttttttagtgattttggagacaggaaacgatggtaaatcgctgtattttttaaaaaaacaaaggtgagattcacataaatattggaggcggtgtttggacattttccattattggaatctgagaaattagtactaaataaaatcgaagagaaacacgtacaggacgtgttttacgttttcatttctagtctggttagttgccacattattttttgtgctgttcgaagatgctgtgttgactgatccggctgaagaagcctttttgacgaactttcttctcttggaagcgggcaccgctcttgttttatgccttgtgttctttctctatcaaaaactcgatcaatcacagttcgcggtgatcaagctaggtatatggggatcagcggtcggtttattgattgatacgatttccctttggaatctccctcatcttcccggctttatcaaagggccaagttattgcgtttgcgatatgatggtatgcacctactgcatgtatttgctcattccgctgaaattatcacataaaaaatgattcagttttaattttcagacttttcttgtcagggaatgattatagaactcgcctaataggatgttacaaagatgtgaaggaggaaacgatgtgaattttgagctgacaaaagaacaacaaatggtgcgtgaaatggtaaaagattttgcgaaaaaagaaattgctcctcacgctgaacatgtagatcaaacaggcgagttcccgatacaaacatttgaaaaaatgggtgaactcggtctgatgggtattccatttccagaagaatacggcggatctggcggtgatacgatttcatatgccttagcggttgaagaagtcggcaaagcctgcggcagtactggattaagctatgctgcagcggtctcgctaggcgcaagccctctttactacttcggaacagaagagcaaaaacagacgcatttgacgccgctggcttcaggcacagcactcggatcattcggcctgacggagccaaatgccggctcagatgcaggaggcactcaaacaaaagcgatttcaaatggtgacgagtatgtaatcaacggcgaaaagtgctggatcactaatgcaagctacgcacgcacagttattgtaaccgccgtaacaggcaaaaacaaagacggaaaaaacatcatctccgcattaatcgtgccaactgatacaccaggacttacgattacgagcccgtacgataaaatgggcgttcgcggttcgaatacagcggaaatattgcttgaagatgtaagagtgcctgcggccaacttacttggcgatccaacaaaagggtttaaacagtttctatatacgctggacggagggcgaatctccatcgctgctcttgcagtcggcattgcccaagcggcccttgacgcatcattggcatatgcgaaagaacgaaagcagtttggacagccgatttcttcctttcaagcgattcaatttaagcttgctgacatggcgatggaaattgatctggcaaggcaaatggtgttaaaagccgcctggctgaaagaccataaccgcccgttcaccaaagaagcggcgtacgccaagctattcgcatctgaaatggcgacaagagcttgcaatcaagccattcaaatccatggaggttcaggctatatgaaagagtatggggtggaacggatgctgcgggacgcaaaattaatggaaatcggtgaaggcacatctgaaattcagcgtctcgtgatcgccagacagcttttaaaataaaaatgtaaacgctttcccatcattaagaaaggaggaacaatgaatggctgaactcatccattccacaatcggcaggctgctggaacaaacagctgatgcgtatcccgatcgagacgctgttgtgtatccagaccgaaatatccgttatacgtacgctcaatttgacagtctgtgccgtcaaaccgctaaaggccttatgcggatggggattggaaaaggagaccacgtcgccatatggacttctaatatccctgaatggcttgccgtccagttcgcaactgcgaagatcggagccgtgctcgtaaccgtcaataccaattatcaagcacacgaactggactacttgttaaagcaatcggatgccgccgcgcttattatcatggattcatacaggggcacttcttatccagacatcgtgaacagtttaattccagaactgcaagaagcaaagcccggccaactgaaatctgaacgctatccctttttaaaaacgctgctctatattggcaataaacggttgcctggcatgtatcattgggacgatacagagatattggcgaaaacagtgacagatgctgagcttgaagagagaatgaacagcctggataaagacaatgtgattaatatgcaatacacatcaggaacgacagggtttccaaaaggcgtgatgctgacccatttcaatgtcatcaataacgctgccaatatcgctgaatgtatggctttaacctctcaagaccgcatgtgcatccctgttccgttttttcactgctttggatgcgtccttggggttttggcatgtgtatccgtcggggcagccatgatacccgtgcaagaatttgatcccgttaccgtccttaaaacggtagaaaaagagaaatgcacagcgctccatggtgtgcctaccatgtttatcgccgagctgcatcatccggattttgatgcatatgatctatcgacgctccgaacaggaatcatggccggctctccctgtccaagtgaagtgatgaaagctgtgattgaaaggatgggcatgaaagacattacgatcgcctatggacaaaccgaagcctcgccagtcattacacaaacgagagcaaacgattccttcataagaagagtcgaaacaaccggacgcgccctgccacatactgaggtgaaaattgtagaacccgggacatgtcaagaagttcaaagaggcgtgcagggagaactgtgcacccgcggctatcacgtcatgaaaggctattataaagacaaagaagcgaccagaaaagcaatcaatcatgacggatggctgtttaccggagatcttgctgtcatggatgaagacgggtactgccgcatcaccggaagattaaaagatatgctcatcagaggcggcgagaacatttatccgcgggaaattgaagaatttttataccggcatcccgctgttttagatgtacaggtcgttggtgtgcctgacgccaaatttggggaggaagctgcagcctggattaaactgaaagacggtaaaagcgtttcacctgatgagcttaaagcctattgcaaagggaaaatcgcccgccacaaaattccgcgttatgttatttttacggatgactatccgatgacggcctcaggcaaaattcaaaaatataaactgcgagaaaaaacgattgaaatgttcaacctatcatcaagtcaatgaggtgaaatcatgtttacaaaagtactgatcgccaaccgcggagaaattgcaatgagaattatccgaacatgcagccgtctcggcattaaaacggttgcggtttattcagaagccgacaaggacgcgctccatacaaaagccgctacagaggcttatttgatcggagaatcgagagtcagtgaaagttatttaaatatagagagaatcataaagacggcgaaaaaagcaaatgccgacgcgatccacccgggatatggattgttatcagaaaacagtcggttcgctgaacgctgcaagcaagaaaacatcgtgtttatcggaccttcccctgatatcatcgcaaagatgggcagcaaaattgaagcgcgaaaagcaatggaggctgcaggtgtccctgtggtaccgggcgtttctgaatccctcggagatatagaggcagcctgccgcaccgcatgtcaaatcggctatcctgtcatgctgaaagcttcagcgggcggagggggcatcggaatgcagcgtgttgaaaatgaagaagcattaaaaaaagcgtacgagggaaacaaaaagcgcgcagcagattttttcggtgacgggtcgatgtatatagaaaaagttattgaacatgcgcgtcacatcgaggttcagcttttggctgatcaacacggccatacagtacatctgtttgaacgtgattgctctgttcagaggcgccaccaaaaagtcattgaagaagcaccgtctccatttgtagacgatgaactaagaatgaagattgggcaaacagcggtaaaagcagcaaaggcaatcggctatacgaacgcaggcaccatcgaattcatagttgaccagaagcaaaatttttatttcctcgaaatgaatacgagactgcaagttgaacaccccgtgactgaagaaataacaggcctggacttagttgagcagcagctgcggattgctgcgggccatacactcacattctcccaaaaagacatccaacggaacgggcatgcgatagaggttcgaatatacgcggaagatcccaagaccttcttcccgtcaccaggtacgatcactgcgttttcacttcctgaccaaaaaggagtcagacacgaatgtgcggtagcaaaagacagcaccgttacccctttttatgacccgatgatcgctaagatgattgtcaaaggccaaaccagaacagaagcaattgaaaaactagagacatcgcttcgcgactatcgtgtagagggaatcaaaacaaatcttccgcttctcatacaggctgcggcaacaaaggcatttaaagaaggggatgtcacgactgactttttgaaacaacacctataaaggaggcagttgtcatgacggttagcatacaaatggcaggaaacctgtggaaagtccacgtcaaagccggcgaccaaatcgaaaagggccaggaggtagccattttggaatcgatgaaaatggaaatcccgatcgttgcagatagaagcggaatcgtaaaagaagtcaaaaaaaatgaaggagactttgtaaatgaaggagacgtactgctcgaactgagcaattccactcaataatttggaggaagaccatgtcatatcctaaaaaagtgacaatcaaagaagtcggcccgcgtgacggcttacaaaacgagcccgtatggatcgcaacagaggataaaataacctggatcaaccagctttcccggacagggctttcgtatattgaaatcacatccttcgttcacccgaaatggattccggcgcttcgagatgctatcgatgtagcaaaaggcatcgaccgtttaaaaggggtaacgtacgcggcacttgtcccgaatcaaagaggattggagaatgcgcttgaaggaggcattaacgaggcttgcgtttttatgtccgccagcgagacgcacaacagaaaaaacatcaataaatccacttctgaatcccttcatatactcaaacaagtaaacaacgacgcacaaaaagcaaacctcacaacaagagcctacctctcgactgttttcggctgtccgtacgaaaaagatgtccccattgaacaagtcattcgcctttcagaagctctatttgaatttgggatttctgaactttcgcttggagatacgattggagcggctaatcccgcccaagtggaaactgtacttgaagctcttttggcacgattcccggctaatcaaattgccttgcattttcatgatacgagaggaaccgctctggccaacatggtcacagcactccaaatgggcatcacggtgtttgacggctcggcaggcgggcttgggggatgcccatatgcgccaggttcatcaggaaacgccgcaactgaggatatcgtgtacatgcttgaacagatggatatcaaaacaaatgtaaagctagaaaaactgctatctgcggccaaatggatagaagaaaaaatgggcaaaccgctgccgagcagaaatttacaggtgtttaaatcatcttgataaaagggaggacgcatacaatgggagactctattctttttactgttaaaaatgaacatatggcgttgatcacctttaacaggcctcaggcagcaaatgctctttcagcggaaatgcttagaaacctgcaaatgattcttcaggaaattgaattcaactcaaacatccgctgcgtcatcctcacaggcaccggtgaaaaagcgttttgtgcaggggcagacctaaaggaacggataaaactgaaagaagatcaggttctggaaagtgtatctctcattcaaagaacggcggctttacttgatgccttgccgcagccggtcatagctgcgataaatggaagcgcattaggcggcggactagaattggcattggcatgcgaccttcgaatcgcagctgaatcagctgtgctgggacttccggaaacagggttagctattatcccgggcgctggagggacccaaaggctgccccggctgattggcagaggaaaagcaaaagaattcatttatacaggcagacgcgtgaccgcacacgaagcaaaagaaatcggccttgtagagcatgtcacggctccttgtgaccttatgccaaaagcagaggaactggccgcagccatttctgccaacgggccgatcgctgtccgtcaggctaaatttgcaatcaataaaggattggagacagatctcgctacaggccttgcgattgaacaaaaagcgtatgaacaaaccatcccgacaaaagacaggagagaagggcttcaggcctttcaagaaaaaagacgggccgtatacaagggaatataaaagggaggcaatgctcatggattatgaaaaggaacgaacagaacgggctgaacggattcgaaaaggcggagcggaaaagtatcatcaaggcaatcgggaaaaaggcaagctctttgtcagagagcggctttcccttctctttgacgatgacattgagctagaagacgctttttttgcggaatgtatgtcagacgggcttcccgctgacggagttgtaaccggtatcggcaaaatcggcggccaaactgtttgcgtcatggcgaatgattcaacagtgaaagcggggtcatggggagctaaaacagttgaaaaaatcatcagaattcaagaaaccgcggaaaaattaaactgtccgctcatttatttagtcgattcggcaggcgcccgaattaccgaccaaatcaatgtctttccagggagacgcggtgcaggaagaattttttacaatcaagtcaaattatcgggacgcattccgcaaatctgtctgcttttcggaccatctgcggcaggtggcgcttatattccggccttctgtgatatcgtcgttatggtagacggtaacgcctccatgtatttaggctcgccaaggatggcggaaatggttattggagaaaaagtgtctcttgaagaaatgggtggcgcccgtatgcattgctcaatctccggctgcggagatattcttgcagaaactgaagaagaagccatacagctggcgcgggcttatttgtcttactttccggcaaattttcaagaaaaagcgcccattcatgagaaacgcccgccaaaacacttcaaaactccgcttgccgacgtcattccgcaaaatcaaaacgcaccttttgatatgcatgagctgattgagcgggtcatagatgaagactcattttttgagatcaaagccttatttgcaccggaattattgacgggcctcgcacgaatccacggacagcctgtcggcattgttgcaaaccagccgaaggtaaaaggaggcgtcttattccacgattcagcagacaaagcggctaagtttattaccttatgtgacgcttttcatatcccattgctgttcttagccgatatccccggttttatgattggcacaaaagtagaacaggctgggattatcagacacggagcgaaaatgatttctgcgatgtcagaggcaactgttccaaaactctctgtcattgtccgaaaagcttacggggcggggttgtatgcaatggcagggccggcatttgaaccggattgctgtctagcgctcccaaccgcccaaatcgccgtcatgggccctgaggcagctgtaaacgctgtctacgctaaaaaaatcgccgagctgccagaagaagagagagccgcatttatcagcagcaaacgggaggaatacaaagaggacatcaatatctaccgtctggcttcagaaatgatcattgatgctgttatcccagccaattcgctgcgtgatgagctggccaaacggctcaaggcatacatgacaaaggaaatgacatttaccaatcgaaagcatccggtttatccggtgtaaaagcaagaacttaggagcgcaaaaaaagcgctcctttatatatttacaataacaacattatgtcaactaattaccattgcataaaacgcttggttttttagaatagtaaataaaggctgccgcacctctagcggcaattgtcagtttatcataaaaaggggcctacattatgtatcatttatattcacataacgacttggacggagtaggatgcggaatcgtagcaaaattggcgttcggaaaagacgtagagatccggtataactctgtcaacggcttaaacgcacaggtgcagtactttttagaaaaagcgaaggagagcaacagacaggacgcgttattcatcaccgatctcgccgtcaatgaagaaaacgaagagagattgaatgagtatgttcatgcagggggcaaagtgaagctcattgaccatcataaaacagcccttcatttgaatgagcatgaatggggatttgtccaggtggaatacgatgatggaaggctcacatccgcgacatcgcttttatatggctatctcgttgaaaatggcttcatgaaaccgacaaacgccttagatcaattcacagagctcgtccgccaatacgatacatgggagtgggagcggtacgatcaaaaacaggcgaagcggcttaatgatcttttctttttgctgtcaatcgatgaatttgaagcaaaaatgatccagcgcctttccacgcatgacgaatttttcttcgatgattttgaagaaaaactgcttgatttagaagacgaaaaaatcgagcgctacctccgcagaaagaaaagggaaatggtacaaacctttgttcacgaacactgtgtaggcatcgttcacgctgaatcgtaccattcagagctggggaacaggctagggaaagataacccgcacctcgattacattgcgattttgagcatggggtcaaaacgagtcagtctccgcaccattcatgattacatcgatgtgtcagaaatcgccggccgatatggcggcggagggcatgcaaaagcgtccggctgttcaataaccgatgaagtatacgagttgtttgtagctgaagctttccgtattgatcctgtacggccggatgccttccgtaacatctataatctaaagggatctgcgaatggatcattatatgaaaatcgcgcacaaatgagattttttcttttccctttagacaacgaatggaatattcaaattaacggagaaacccaagacgaaacattcgcagcgtttgaagaggcagaatggtttattaagagaaattatgccgcatcgctcgtgcgggatgaagtgtttgtcgcatttttagcggagaatctgaagctggcaaatcaacatcgcaagtaaaaaaatatgcataggggagcgtcagtcaccccctatgcatatccgctagctatcgtttaaatatggctgtacgtttcttaatcacaaaataaagggctatcacgacaacagccaatatcataatcggtgttgtataagtgcccgctatattctcaacatcatcccactggcttcctagctgtatgcctaaataaacaaacagaatagaccatggaatgatagcaagcacagtcagtaccacaaatttgagaaaaggcattctggcaatacctgccggaatggatatggcatgtctgacaaccggtataaaacgagccgagaagacaactccggcgccgtatttctgaaaccagttttccgacatgtcgatatgatgctttttaatcaataaatacttcccgtatttgtccagaaatggcctgccgccatagcggccgatccagtaaataaagatctgggcaatggtgcccccgataacacccgcaataattgcgccaataaatccaatcgtgccctccgataccatatagccgccataagctaatacaatctcactcggaatgatttcaatcattaacccaatcgcaatacccgcatatcccatgttcgtcagccatgttaaaatttcgcttatcaaactgcccacattcttcacaacctgtcctaatctttttcactattatatgactgattgacgagcaagatggttacaatttttttaccgcagcatttctttcgtttcccgtttgatcacatcttctaaataggccaaaagctgagatctcatttcgggacgcattaagccgatttcggtgctcgctttaaaacagcccagcttatcgccaatgtcatatcgatttccttccagcaaccgggcatggatcggctccttacggcaaacctcacgaagcgcatctgtcagctgaatttcgttgcccgcgcctctgccaattgtcttcaaaacggagaagatcgaagaattcagcacataacgtcccattactgcgatttccgaaggtgcttcttcaggagaaggcttttccactaaatcgttcacttcatatacatgcccttgagaccctgatgtatttataataccatatttgctgacatcctcagggagaactgactgtacaccgacaacctctgtgccataaacgtcatatacatccattaattgccgaagagccggtgtttcagacaccataatatcatcacctaagagaacagcaaaaggctcatctccgataaaatgctccgcacacagcaccgcatggcctaatccgagcggttctttctggcggatgtaatgaatgttggccaaatcggcaatctgctgcatttccttaagtgtctccgtcttgcctttttcccggagattgaattccaattccgccgaccgatcaaaatgatcttcaatcgagcgtttgtttctccctgtaataatcagtatatcttcaattcctgactctgcggcctcttctacaatatattggattgctggtttgtcgacgattgggagcatttctttaggctgcgcctttgtcgccggcagaaatctcgttcctaaacccgctgcgggaataactgcttttctcactttttttctcattcatcctcactcctgatcctgtatgtttttcagtgaatctccaaatacccagattcggtttccgataaaattcatcatcattccgccgatagtggcggcgagcttactcaccaaaagcgagcagccgcaattttgaaacaaataaagcagcaaaaaggtgatccccgacgcggcaatattaatcatgagaaaacgcacgatctctttcccgtcagccttacgtttcacacaaaacgtccaattccggttccacacatagctgttgacgatacctgcagtataggagcagatctgcgccggcagataagagacatgacaagcggtaagaagaaagaagacaccaaaatctatcagcgtattgccgacgcctacggtgcaaaaacggcctaaggtctttattttttctttcagcgtaacggacctcccttcataaaagatgcgagtggcagtcatatttgttgatatggattactatagcggacagtgttgaataaacaattaataaaatatgaacaaaacatgaaaaaagcgggtataccgctcaatagtttttatactctttaaaaagcagcggcatgaacggctgatttttcgaaaacgctcattacaaaaagatgaaaaaatatgacatatttcgcaggggaagagggcgaaatgataacgaaaggtcttgcaaagaagagaacaatacttcaatagattgagtggtcttaagccttgattccctatcagcagagatgatgtctattatgtcaataatcgagggaacagtctaagcgaagaagagtcggtaacagccgtatatgtagccccatctaaacaatgaataaatgtatccagttcctttgtagaatcgaacacgaattcctccaaaagtattctatacactatttttttaataaggtaggatgttagataaagggatttttttgaataaatatacatacctgctcaagcgttataggggacttgaacaattcgccattttattttctggacaatgaccgctaggaatgggggaacttttctagattgatcttgaagaaacaagtggtgcagtcttcatgacctgttgttaacaaatttcaaaagaacccttcattttaaggaaaaaggaggctgttaagtgatgaggaaaaagtgtagcgtatgtttatttgtttttgctttactattgagctgtttatctggaaagtctgcgtatgctgccacaggtactacaattgcaaaacatatagggaattcaaacccgcttatcgaccatcatttgggagcggatccggttgcgctgacctataacggaagagtctacatctatatgtcaagtgatgactatgaatataatagcaacggaacaattaaagataattcatttgccaatttgaatagagtattcgtcatatcttcagcggatatggtgaactggacagaccacggagccattccggtagcaggtgccaatggagctaatggaggccgtggaattgcaaaatgggcaggtgcgtcatgggcaccgtcaatcgcagttaaaaaaattaatggcaaggataaattcttcctttatttcgcaaacagcggcggaggtatcggggttctcaccgcagacagcccgattggtccatggaccgacccaatcggaaaaccgctcgtaacgccaagtacgccaggaatgtctggtgttgtatggctttttgatccggcagtatttgtagatgacgacggaaccggttacctgtatgctggcggaggcgttcctggcggttcaaatccaacgcagggacaatgggccaatcctaaaacggcaagggtcataaaattagggcctgatatgacgagtgttgttggaagtgcatctacaattgatgcgcctttcatgtttgaagattcgggattgcacaagtataacggaacatattattactcctattgcatcaatttcggcggcacgcacccggccgataaacccccgggtgagatcggctacatgaccagttcaagtcccatgggcccctttacatatagagggcatttcctgaaaaatccgggtgcatttttcggaggtggcggaaacaaccatcatgctgttttcaattttaaaaacgagtggtatgtggtgtaccacgcgcaaactgtcagttccgctctgttcggggccggcaaaggataccgttctccccatattaataagctggtgcataacccagatggatccatccaagaggtagcagcaaattatgcaggtgtaacacagctttccaatttgaatccttataaccgggtagaagctgaaacgtttgcttggaatggacgcattttgacagagaagtccacagcacccggcgggccagtaaataatcagcatgtaacaagcattcaaaatggagactggattgctgtaggaaatgcagacttcggagcgggcggtgccaggtcatttaaagcaaatgtagcatccactttaggcgggaaaatagaagtgcgcctcgatagtgcagacggtaagcttgttggaactctgaatgtgccttcaacaggcggagcgcaaacgtggagagaaatagaaactgcagtaagcggggcaaccggtgtgcacaaagtattctttgtatttaccggaacaggtacaggaaacttgtttaattttgattactggcagtttacgcaaagatagcactcgtaatgggaccgcttaaaaacgaggcgggtgaagtacgagccatcaccggaacagcccgccattatggatatgccatgcagattttttaataccgtaaaagacacatgacgaaggagaggaataaatgattccacgcattaaaaaaacaatttgtgtattattagtatgtttcactatgttgccagtcatgttagggccaggcgctactgaagttttggcagccagtgatgtaacagttaatgtatctgcagagaaacaagtgattcgcggttttggagggatgaatcacccggcttggattggggatcttacagcagctcaaagagaaactgcttttggcaatggacagaaccagttaggattttcaatcttaagaattcatgtagatgaaaatcgaaataattggtataaagaggtggagactgcaaagagtgcggtcaaacatggagcaatcgtttttgcttctccttggaatcctccaagtgatatggttgagacctttaatcgtaatggtgacacatcggctaaacggctgaaatacaacaagtacgcagcatacgcgcagcatcttaacgattttgttaccttcatgaagaataatggtgtgaatctttacgcgatttcggtacaaaacgagcctgattacgctcacgagtggacgtggtggacgccgcaagaaatacttcgctttatgagagaaaacgccggctcaatcaatgcccgcgtcattgcgcctgagtcatttcaatacttgaagaatttgtcggacccgattttgaacgatccgcaggctcttgccaatatggatattctcggaactcacctgtacggcacacaggtcagccaattcccttatcctcttttcaaacaaaaaggagcggggaaggacctttggatgacggaagtatactatccaaacagtgataacaactcggcggatcgatggcctgaggcattggatgtttcacagcatattcacaatgcgatggtagagggggactttcaagcttatgtatggtggtacatccgaagatcatatggacctatgaaagaagatggtacgatcagcaaacgcggctacaatatggctcatttctcaaagtttgtgcgtcccggctatgtaaggattgatgcaacgaaaaaccctaatgcgaacgtttacgtgtcagcctataaaggtgacaacaaggtcgttattgttgccatcaataaaagcaacacaggagtcaaccaaaactttgttttgcagaatggatctgcttcaaacgtatctagatggatcacgagcagcagcagcaatctacaacctggaacgaatctcactgtatcaggcaatcatttttgggctcatcttccagctcaaagcgtgacaacatttgttgtaaatcgttaagagcacaaagacacacataaataatagagtgtctgaattggcgattttccgattgggaaatcgcttttttattttgttgctgaattacaggaagaagaaaggatgtacataaaaacagcaaagctttaatcttcatcttttctagtttacataatatatattctaggaagtaaagaaaataaataaattcctgtctcaatataaaagtatacttaagttagtgagacaggaattaaaatttttctgctgaatgacaaatcaaaaaaatggcgttgtcaatccataataaacggcttctaaatcctccagcgtcatatcgccatatgcgcatttgataacagaatcagcaaacacatcatagtcataatctgtagaaaatccttgctgcaactgtttttcgtaaacttcgatctgatctttttgatgctggatgtctttttccttacctggatagtccggaccatttatcatattactcatttttttgtacagcaccatatactgtttcagtatttcatccacaacgcaaacctcctattagatgataaaaacggacatcgttactgatgtccgccaaaaaaagcttaactaatttggttctgttccccaaatcagttttccttgatcatataatgtgatttttttcgttgttttaaacgtatttgatttgaaaaaggaataatcgccgctttgtgcataattgctccagtcatcattgtgaagacgaagctgaatattccctgtgcttgctcccggtcccagcgttccgtttttaaacccaagttccagataggtatctgcaccttgctttggtttatgcaacgtcacaaacttgtgtgtcacattgccgcatccaatctgcgcgtagtcacagtcaacgttttggcctttgtttttcgctttataccagtaacgggcagtgacatcttttaaatcaaccgtggtattgccgttattttttatttgaagctgcggacggatttggttgctgttcatactcccatcccctgctctgtattgtacagaaataccgttttcctgtgtgggtttatcttttgctggcgtttcaggaatgtccttcgtcgcatctttggtgccgagaatgttttctctaacgaatgttcctgaagcagataaatctgacaaccgccagccgcctgttttagatgcccccggctttaaagctgaggatgattcctgcttatcagaaagattccagttcacccagctgatggtcttgctgtcgagatatttcagccattccctcgattgatcaaggaatacaccgccattgccagacgcgtcgcttgttccccactctgtcacaaaaataggtgctcctttgctgagtgcatagtttgctttatcccgtaaaaattggccgtgtgtgccggcataaaaatgaagtgcgtacataacgtttgcatcttttagctggtcatcggcagcatcattcacatcctggctccatgtaccggttccgacaatgatgatgttgtctggatcatttttgcggataactgaaatcacttcttccgcatatggtttaatatcacgcttccagttcacatcaccgtttggttcgtttgcaatttcataaatgacgtttggcgtgtttccgtaaaggcttgacatttccttgaagaattcttttgccttctctttattttggtttggattaccgtcatttaagatatgccagtcaatgatgacatatatcccaagctcttttgccgcttcaaccgcttcttttactttatttttcacggacgggttgtcaatataaccgccatctgccgtatacatcgctgcacggaaaacggtgataccccaatcatctctcagccattttaagctgtctttattgacatattctccataccattgcaatccgtgtgaactgatccccttcagctgtaccgctttaccgtctcggttaacgagctgtgtaccttttatgctaagctggccattcttggctactggcgtttttgtccctgctgctgatgccggcgaagctatcatgccgcccattgtcaataacgtaatcaataaacacgtaataaaaatagagattgaccgtttcatatctgatcttttcctccttcgcatcattttggctctacacttcttatgagcacgaactcattgtaaaaatctttctcatgattgtctatcaacctaatttcttgtttttgggaggtttaaaagcctgtcaatttgctctacctccaatgaataagacacacatgacacatatagaacaaagaaaactggactgaattgggactttacacgtcatttttcattcgagtcgaaaaattaaatttatttccaataatgaaaaagctgcattcaactattgaatgcagctttgttttatatttatattatacttcttgtttctcatcttcccatgtttcagcgtttttcagccctgggatgtttttcgctttgaatacaggatcaagtccttgtttacgctgtttcgcgtaatctttatacactttgtaggcaacgtttgacagcagcgtaatcacaattaagttgatcagcgccatgatacccataaagaggtccgccatatcccaaacgatttggaagcctgataaagatccatacacaaccatagcaattacagcgatacggtaaatgttcagccatgttttgcttgttttaataaattcaatgtttgtctcgccataataatagttgccgacaactgaactgaatgcaaacaagaacattgcgactgcgatgaaagtcggcgcccagcctccaatatgatggttaagagcagcctgtgtgacttggatgccgtcgccttttggcgttacactgtacagcaaaataataaatgctgtggacgtacatatgataaatgtatcgaaaaatacgcctaatgtttgaataaagccttgctttgccggatgggatacatgagccgtcgcagccgcgtttggtgcgctccccattcctgcttcgtttgaaaaaagtccgcgttgcgcaccgataacgatgatgccgcctattccgccgccgacgacttgttcaaaacctaaagcatttttaacaattgtagcgataacgccagggaaagccgtaatattcgtgatgacaacaaataaagcgataagaatataaatgcctgccataaccggcacaattaactgtgaaacagcgacaacacgttttaaaccgccgaaaatgataaacgcagttaaaaccgccagaactatggctacaactattttattcacatggaatgcgccatccaatgctccagcaattgtatttgtttgaacagcgttaaaaatcaagccgaatgagacggtaattaaaattgcaaaaacgatgccaagccatctggcaccaagacccttttgaatatagtaagccgggcctccgcggaaatcctccccgtctctcaccttataaagctgcgctaacgtactctcaacaaagcttgaagccatgcctactgcagctactacccacatccaaaatacagcgcctggtccgcctgtcgcaattgctaaggctacaccagtcaaattccctgtgccgactcgggatgcggccgaaataaagaatgcctgcatagatgaaacacctttatttccttccggcttctcccctactattctgaacatttcaataaaataacggaattggataaaaccaaaacgtatggtaaaaaataatccaagccctattaaaatataaaataggtatttccagatgaaatcacttggaatattaatcaaactattgaaaaaagactccatatttacctcccgttttcatcaattcaatacgaattcgattttgatgttagattttttaacataacgagttttattatatcacaatatgacgaattaggaagttttttcgagaagaatattgtcgtagccagatgttactctgtcgaccccttctctattattttcctacgaataaaaacattccttgcaagctggcttttataaaagagtgccctattaacaatgtaatcatttcttcccattctcttgcctttctctttgatttagcacataaataaagtaataaaccctaaacaacaaacatatcatttaaaatatgtttttattcacaccataaaccgggtatacatacgctaataaaagaagttttctctttcaaaaactctttcaaaaataagcaaaaagatatatacttaacaaagttaattttatttttaaatttaataaatcaggtttacttttaggatggattggggtattattataaaaatattcagtaatattaaaggaggggggagatcatttgaaaaaagtaacgatattgaaagcatccatcttattcttggcgattgccagttttcatttgttctcaattccccacgcctttgatatcggccatcattataaagccgtagccgaccagcaggaaatgcatgagatgaaagccggccaaaatgctgatgatgagaagaaatccatcacaggggcatttacgctgaccgctttatgggcaatggctgttctgctgctgaccgctgaaagcaaaagtacgggatactcccgcagacgtcagcggaaaaaaagctttatactggccaaattttatcaatcgtcttatttcggcaaacttcatgttcaacatcacccgattatgtaacgaaaatatgaggaggctgttaaacatgttgtttatcttaagaatggtgattttaggcttattttctttcacagcgctgaatttatttgtatggcaggggattgaagtcattcatgctgtaacagatctattcaccaaccatgaaagctgataaaaaacaaacgaaacccgctcatatagtatgagcgggttttttattattgttctgtatgaaggcgccaaacagctgtaaccttgcctgattcctcttcatcaaaaaagaaagagccattgctgtatctgtcgtttgtccgcaactcttttgcctgcagttcttttctgtcgcctttttctgtttctgccattagtcgctgttcaagaccgcaagcgaacagtgctacaactcggtgaggattctttttcagttcccttagcattacgacaccgcgttttgcgcgggatgtcttctcgaactcagaaagactcatgcgttttaccgctccccgctgtgtgaacaagacaattgaatcagattgctgaaggatctcaccggagacaacaaagtcatcctcttttaagttaatccctttgacacctgccgcacgcgcgccaactacattcacttcgtcttctccaaaccatagaccataccctaagtgagtggccataaagatctggctttccccatttgttacatgtacatcaatcagttcatcttcacccttcagatttaaggctacaagcgccttagaataacgctgtgctttataatgggtgagctctgtctttttcaccataccgtttttcgtaaagaatagaagatatgccgacggatcaaattcttttatcggtatagcctttacaatcgtttcatcacggtcaatagtgatcagatttgaaaaatgctggcccatgtccttccatctgatatcaggcagctggtgaacaggacaatagatgtagcttcctttgttcgtaaagagcagcagcacgtctgtcgtattcatttcaaactgatgcagcatcctgtccgtatctttcattccgaagtcctgaccgttggaagcggcaaatgagcgctggctcgtccgttttaggtaaccatccttcgtaacggttacatatacatcctcagatgcaaccatgacttcgagattgattttaatttcttcaattttttcttcaatcacggagcgtctcgtatctgcatatttctttttcagtgcttttaagctgtttgtaatcacttttagcagttttttatcattgctcagaatagattcgagctcttcaatttttttaccgagctcttctgcctcttccttaagcgctgtgatatcggtattggttaaacgatatagctgcaatgacacgatggcttcagcctgaggctctgtaaattcatatttggcgatcaaattgtttttagcgtcacgtttatcgctagaagaacggattgttgcaatcacttcatccaaaatagacaaagctttcatgagcccttctacgatatgatgtctgtcttttgctttttgaagctcgtaaacggaccggtttgtgacaacttccttttggtgtccgatatatgcatccaaaatagacggcaggctcatcagcatcggacggcggttatggatagccaccatattgaagttatatgtgatctgcaaatcagtatttttatataagaaattcaaaatgcctttggcatcagcttcttttttgagttcaatgaccactctcagccctgttcgatccgtttcatcacgaacctctgagatgccttcaacctttttatcaatacggaactcgtccattttttttacaaggtttgctttatttacttcaaatggaatttcagtaatgacaatttgttctcgtccgcctctgattgtttcaatttcagcctttccgcggataatgatttttccttttccggtttcgtaagcttttcttatcccgtcaacgccctgaataataccgcctgtcggaaaatcaggccctttaatgacttccatgagttcatcaacagagcaagatggcatttgaatacgcttaatgacagcatcaatgacttctcccagatgatgagggggaatgtcggtcgcgtatcctgctgaaatcccggtagatccgttgaccaataggttagggaacatcgccgggagtacgacaggctccttgcttgtatcatcaaagttcggcacaaattcaaccgtgtttttgtcaatatcccgaagaagctcagatgcaatcggagataatcgtgcctctgtataacgcatggctgccgggggatctccgtcgatgcttccattgtttccatgcatttcgattaacacattacgaactttccaatcctggctcatccgcaccattgcttcataaaccgagctgtcaccgtgcggatgatagttaccgatgacgttaccgaccgttttggccgcttttctgaagtttttatcaaacgtgtttccatctgtatgcattgcatacagaattctgcgctgtaccggctttaatccgtctctcgcatcgggcagcgccctgtcttgaataatatatttactgtagcgtccaaaacggtcgccgatcacctcttctaatggtaaatcatgaaataattctggctgtgacaatcattaaacctcctcagcgaccgataagttttcattttctaaaatattgctttcttcatctaagccgaaagcgacgtttttctcaatccactttctgcgcggctctactttgtctcccattaacgtcgtcacacgtctctctacacgtgccgcatcgtcaattttgaccctaacaagtgtgcgggactccggattcatcgtcgtttcccacagctggtctgcgttcatctctccaagacccttatatcgttgaatggtatagcctttgccgacttttttcaggacatcacccatctcttcatcagaccatgcatattcaatgatttcctttttcccgcttcctttactgaccttatataaaggtggcagggcaatgaacaccttgccatgctcaatgagcggtttcatatagcgatagaaaaaggtaagaagcagcacttgaatatgggcgccgtcagtatcggcatcggtcataatgatgattttgtcgtagttgatgtcatcgattgagaaatctgccccgactcccccgccgatcgcatgaatgatcgtattgatctcttcatttttaaagatatcagcaagcttagctttttctgtattaatgactttaccgcgtaaaggcagaaccgcctggaatctgcggtctcgtccctgcttggctgacccgcctgctgaatctccctcaacgagatacaattcattttttgccgggtttcttgaacccgcaggcgtcagctttccgcttaaagtcgcttctgatttttttcgttttttgccgcttcttgcttcttcacgggctttgcgtgccgcttcgcgcgcctggctcgccttgattgcttttttgacaagaagcgttgcggtgtcccgattttcctctaaaaagtaagcaagctgctctgaaacaatcgcatccaccgctgatcttgcttcactggtaccgagctttccttttgtttgtccctcaaattgaagaagctcctcaggtatgcggacagaaataatggctgaaagcccttcccttatatcggtgccttcaaggttcttatccttttctttcagcaaagccacttttcgcgcatattcattaaaagcacgcgtcatcgcagtttttgcacctgactcatgtgtcccgccgtcttttgttctgacattgttgacaaacgacaaaatattttcagaataaccatcgttaaactggaacgcaaagtccacttctatagaatgatgctcaccctcaaacgagaccacttcagacaagacgtctttttcttcatttaaataagcaacaaacgcttctatgccgttttcataataaaagacctcatgctggtcattgcgttcatcaatcagctcaattttcaatccttttaacaaaaacgcagactctcttaagcgctcagagagcgtttcaaaattataagtggttgtgctgaacatcgttggatctggcttaaagtgtgtaagagttcccgtcttttttgttttgccgatcttttcgagagatgtaaccggttttcctccattttcaaatcgctgctgatagacaaaaccgtcccgctcaatggtaaccgtcagccattcagataaagcattcacgactgatgcaccaactccgtggagcccgccgcttgtcttatagccgccttggccgaattttcctccggcatgaagcaccgttaaaatcacttcaggggttggtttgccgagcttatgcattccggtcggcatgccgcggcctctatcctgtacagaaatactattgtctttatgtattttgacgattatgtgatctccatggccggcaagcacctcgtcgacagagttatctacaatttcataaaccaagtggtgcaaaccccgcgcgtcagtagagccaatatacatacccggccttttcctgacagcctcaaggccttcgagcacctgtatggcatcttcgttgtaatcaaattgctgttttctagccaaacgtacaaacccctttcaaaaactaacattgtctttctcttttcagtgttacacatcatttgtatataagatattttttataaacctcgcctcgagccagtactgccttggactcctcattataaccaatatgtttgcaatcgcaacatagagctaacgaatcagttcttctcaaaacatcggctagtgctgtttttacactatgagaacgtatgtttgtttattatatataaagcagcagaccttcgcaaatcgaacggccgaaacccagctggacaaggtattcaaaaaaagctgttcaagctttattgtatctgtttcaccgtaatacgcaaacaatatcttaaaattaaaaagcaaaaatccttgaatttacaaggatttttgcagttctgcacctattttgttacagcgtgtgccacttttatgcacagatccatgataaccgttctgcctttttcttttagcatctggtatgcttcctcattaactagcccttgctgtgcccaaaatactggcgcatctgtctctaaaaactcttccgccactccaggaagctgttctgatcgccggaatacatttacgatgtcaatcggaccgtctatctcttttaaagatgaaacggctttgatacctagcgcctcatcaattgtagggttcacagggataatttcataacccgcgtcctgcattgcttttgaaaccatatgtgacgttctatccggacggtctgaaagccctactaccgctatacgtttgcttctttgaagaatctctttaatttccgctttagaaggattttgcatcgtgtgtcactccttttccacttattttacacgatcaaaacaggagaaatcaaaatatgatgcatgtttgattggatttgtaagcaaactttacaaaaaaacttatcatcagatcatgacatctcatgttaaaataaaaagaagggaatttgaaaaaggagaaatgtagatgttaattgctttattgattattttggcctacttgataggcagcattccgtctggcttaattgtgggcaagcttgccaagggaattgatattcgggagcacggaagcggcaacttaggcgctaccaatgcattccgtacattgggtgtaaaagctggttcggtcgtcatagccggagatattttgaaagggacactggcaactgcattgccttttctcatgcatgttgatattcacccgcttcttgcaggagtctttgcggttttaggccacgtgtttcccatcttcgccaaatttaaaggcggtaaagccgtggcgacatcaggaggcgttttgctattttacgcacccctgttatttatcacgatggttgcggtattcttcatctttttatacttgactaaatttgtttctctctcatcgatgttaacagggatctatactgttatatatagtttctttgtccatgatacgtatttattgattgtcgttaccctgctcactatttttgtgatatacagacaccgagcgaacattaaacgaattatcaataaaacagaacctaaagtaaaatggttataagcttaaaaaacttctcttttgacacagaatagcctaatacgtttataatagagaaaattcaaatgaagaacaaaggggtgttctgttatgaatatgacaattaacgaagacgcattgaactggtataaagaagaactcgatttggaaagcggagaccaggttcgctttttcgtccgctatggaggctgcagcaacgttcaaaagggtttttctctcggtgtagcgaaagatgccccacaagaggctggagtcactgcagaagctgacggcattaccttctttattgaagaaagtgatttatggtacttcgataaccacgaccttctcgtcagctattcagaagacgctgatgaaccggtttttgaataccaataaaaaagaacgcacttcatgtgcgttctttttttacaaatgaaatcgtataagatgatcggttaggttttcttgttccaaaacatatttttgtgtttcacccagcagatcaaagtgaggaaattcacttttcttatggatccattctttttttaacccgtacgccgctccccactgaaccagcttatcaatgtctgcacatccggcttttgtcacagtctttgcttctggaaatcggtcatccagccagtaatgtgttaaaaatgcgatttctcctcttttcactgcttgtttccaccggttaagttcctcccgtttcacaccaaacgccatatcccattcacttccctattttttggccttttcatatgatgtgtgccaatcaggaaaagctttgcggaattgaattggcttaaagctttctttatccacacaaatatgagatgaggtggctttgatggaaagctcaccggccggattataaatgtgataaccatagacggttttaaagccgttatattcctctatccatgtatgtacaaccgcggtttctccgtaatgaagcggctttttataggaaatattgatatcaacgactggggacagaatgccttttttttccatatcactatataaaaagcctaagtccttaatcaaggccgttctgccgacctccatccacacaagataatttgcgtgatagacaatccccatttgatctgtttctgcataacgcacttctatttctttttttgatacatgcaagattactctgctcccttaacgtcaatttagccccattttaccataatcaaatcagaaagaaaaaaaccaggtttccctggttttttaagaacggtatccgttttgtctcgctgcagattcgtcctgtatttcattacgaaacgcttcaatgctctgttcgcgccttgcatttttttctttgatacgctgtttatcttctcctgaagcaaactccattgatgcttctgcttcttctatattttcaattgtattttgaaccatatcctgcaatttttccacattgtcagaacgatcatcaggattaggctgctgatattgattttggttctttgtcattcggatgtacctcctagaaataaactcgaattttcgctactcgccttttgtctgcatgataatcggccgctgtcctgaagtatcatgcattttttcccctttattggctttatattttacaggctttgtacccaagtggcttggagcatattgaggctgaccgtttttcttgttgtttcccatgtttatccctcctcaacagataggtttctcaaaaggaggggtaaacatgaatacaaattaaaggttatttttgcttaaatcgctgttcaagcttttcctcaagctgatttaaatactctgtattggtcatcagctcttttttgttttccatgacgagctcatgaaaagaacgttttctcatcttcttcacgcttctcacctccgcatattcttttattttttccaattctgaaaacttgtaagcatatctgagcataaaaaaaaactgaatctaatcaagatccagtttttgttccatttctttttttgtcatggtgccaacatgtatgtcttggataacacctttttcatctaagatatatgtcgttggatatgacatcacgttatagtcagcattgatcccttttttatcaatcagaatggggaacgttaagtcataagtatcagcaaacgctcggacctgtttctcacttttctcagctgaagtgaaatttaccgcaacaaccgcaagtttgtcggcgtactctttttgcagcttttccatcgcaggcatttcctgacggcacggcttacaccaagttgcccaaaaattgagcagcacttttttgccttttgcatcctgtaaagagcttttctctcctgatagcgttttcaaagaaaaatcaggtgcttgttgcccctcttgaattccgacttcttttttgctgtatgtttgatataaattccatcccgtataaccgactagcatgataagcaggatccctgcgagccattttttcagcatatgccacctccgcagcacattgtgtcataaaaagaagagaaagcgaaatgccttctcttcctattgattcatcaggactgcttcattttttcacgaagcaccatttgaaggatgccgccatggcggtagtaatcaatttcaacttcactatcaaagcggacgactgcttcaaaagttgttacattgccgtcttcattgattgctcttacagtcacaaggtcacgaggacgaactgtttcatcaacatctacctcaatgacttctttacccgttaagccgagtgtatccgcattttcaccttgtttaaactgaagcggcagcacacccatgaatacaagattgcttctgtgaattctttcgaagctctctgcaatgaccgttctgatgccgagaaggtttgttccttttgcagcccagtcacgtgaagatcccataccatagtcttttcctgctaatacgacaagaccagttttatcttctttgtatttcatgcacgcatcatagatggatgttacttcaccagtcggccagtacgttgtaaatccgccttctgtacccggtgcaatttggtttttgatgcgaatgtttgcaaatgttcctctcatcatgacttcatggtttccgcggcgggaaccgtaggagttaaagtcacgaggagaaacacctttttcttgcaaatactttccggcaggcgtatcttttccgattgcccccgcaggagaaatatggtcagttgtgactgaatcgccgaatttaccgacaacacgcaaaccttttaatggttcaaccttgcctggctcaacagacatttcttcgaagaatggcggattttgaatgtaagttgactcgctatcccatttatataatgcttcatctgttgtttcaatttcgttccagcgcttgttgtcatcaaatactgtttcatactctttgcggaatagctctggcgtaacagtttgcttaacaagtgcattgatttcgtccattgacggccaaatatcattaaagtatacgttttgaccatccttgcccacaccgattggatcggttttcaagttaatgtttaccgttccagccagcgcatatgccacaacaagcggcggtgaagcaagatagttgcctttaacaagcgggtgaatacgtccttcaaagttacggtttccggaaaggacagacgtaatcagaagatcatttttcgcaaccgcttcttcgatttccggtgaaagcggacctgagttcccgatacatgttgtacaaccgtagccaacgaggttaaagccaagctctttcatgtatggaagaaggcctgaattcacaagatatcctgtaacaactttagaacccggtgcaagtgacgttttcacgtaattaggcaccttaagccctaactcaaccgcttttttcgctaccagtccggcgccgatcagaacgtatgggtttgatgtatttgtacagcttgtaatcgcagcaatggcgatcgcacccgttttcataactgtttcttcgccgttaaggagtttaaacttaatttctttattttcttcctcagcatttaaaccgaatccttggttacctgcagggctgactaattgctttttaaacgtttcctgcatagcagatagcgggatcaaatcctgaggacgctttggacccgataagtttgcttcaatttgagacaggtcaatttcaaccacatcagtaaattgagggtcttccgcatctggagtgtagaacaagccattgcttctgcagtatgcttcaacaacatcaatatgttcaggatcacggccagtcaggcgcaggtagttaagcgcttcttcatctactgggaagaatccgcatgtagcaccgtattccggagccatattcgcaattgttgcgcgatctgcaagcggcagttcagcaattcccggtccgaagaattcaacaaatttaccgacaacgcctttttcacgcagcacttgtgttacttttaacgccaagtcagtagctgttgttccgtttggaagcttgccgacaagtttcgcgccgattacctctggaactgggaagtaagaaggctgtccaagcattcccgcttcagcttcaattccaccgacaccccagccgagaacaccgataccgttaatcattgttgtgtgtgagtctgttccgacaagcgtatcaggatacgttacaagctcgccgtcttcttcaatggcatggacaacacttgccaagaactcaaggttgacctggtgcacaatacctgttgcaggcggcactgcctgataattattaaacgctttctttgcccagcttaaaaatttgtagcgctctgcatttctttcgaattccaagtccatatttactgctaatgcatcttctgtacccgctttatctacctgtacagagtggtcgataacgagatcaacaggaatttcagggttgattttatcaggatctccgccgacagctgccattgctttacgcagtgaagccagatctactactgccggaacccctgtgaagtcttgtaaaataactcgagacggtttgaacggaacgtcgatatcctttaattcggcagttccccattttgccaaattttccacgtgttcttttttgataacgaagccgtcaacttgacgcaatactgattctaaaagaactttgatggaataaggaagcttcgaaacctttcctatacctgaatcttctaacgcttttaaagagtagtaatgatatgttttcccatttgtagtaaacgtttttctcgcttggaaaacgtcttttgctgcagttttttgctcgtttgccattctccaaaatcccccttcagatcagatcattctcagatgaacattacattccatcacaattttctcacaatttcatattaaaacaaaatcatacataagtaaatatcaatgtttttattaaatacaataagttcgacttatgagaaaaatgtaccggtaatttttactgtttacgctctctcatataacacaataaaagaagccatattatgattgaggtgataatgatggtcaaaagaaaagcgaatcacgtcattaacggaatgaatgacgcaaaaagccaaggcaaaggcgccggctatattgaaaacgaccagcttgtactgactgaagcagaacgccaaaataacaaaaaaagaaaaaccaatcaataacaccgaactcttttaaggaggttctcattttatgaccaataagaatacaagtaaagatatgcataaaaacgcccctaaaggacacaatcccggccaacctgagcctctaagcggaagcaaaaaagtaaagaaccgaaaccatacaagacaaaagcacaactcaagccatgatatgtaagaaaagcagaccttagtgtctgtttttttatgcgttcacccatttataatccaccgcatatgatgtaaagcaaggttgatatgtggaggaatgcttccatgaaccattcaaaacgcaacgatgcgaatgatttcgatagtatggatgaatggcttcggcaattttttgaagaccccttcgcctggtacgacgaaacattgcctattgatttatatgaaacaagtcagcagtatattatagaagcggatctgacttttttacagcctacacaagtaacagttaccctttctggatgcgagttcatcttaactgtcaaatcgtcaggacagacttttgaaaaacaaatgatgcttcctttttattttaatgacaaaaacattcaagccgaatgcgaaaatcaaatactcacagtcgccgtcaataaagaaacagaagatggctcttctttttctcttcaatttcctctcagctaaacataaaaagtcactttcatcccctattatgaaagtgactttttttccgtccatttatcgtcaaataccctctagtgactctcccatggccaaatagcagattcactatacaatagaatatgatctactatctcttttgactagacgtctatcacttttttctattctttttttactgtgttcttctaatctctcttcgtatacaatatggttagaataagggggaatgattgatgctggaaggatggtttttatggtttattctgttttgggtgatcatgatggtagtcttattatcaatcggcggttttttcatgtttcgaaagtttttaaagcgtttaccaaaagaggacggcagatcagagcttgattggcaggattactatattgaaaacagcagacatttatggaacgatgaaaacaaacagtttctagatgaattgactgcgcccgtgccagagctgttcagagatgcagcaaaagctaaaatcgcaggcaaaatcggtgagcttgcattaaaagaaaaggtagcaaagattgatcagcaacttatgatcaaaggctatattctcgcaactcctaaaagagaccataccttcttaaaaaggcatctgcgggacaaaaaaatcgatttggaaccttatcagacccttctcaaataaaaaacctttcctgacaagaggaaaggttttttaattcatttgaatattagatgactgcagctagttatgaagttttcgatatgataaatacatggcgattctccaaggcacaatcataccgaaagccagaatccaaaacattccgctcagtgcaccataatcaattgatgtgctcaagatcgatttcatcacgattctgatcaccaaaagaccgactaatataaaaacaaatgctttagagcgtttcatgtaaatttcattatttttaatttcgaacttagaagttttgattagaaaaatagagaaaatcacacctaaagtgaatgcttccaaaaactctgctccagttacccaaaataccggaaataaaaacattaacgctcccgtactcataaaaatcggcggaagaatgattttttttggtgaaacaggcttgtcagaggactttattctgaccaccatcacagctacagccattaacacagcaataatcgatgaaactataatcatcatacttatcattcctttgtttctcggagtgttgatactatatactatactccaaaacaataaaaaaaaccattttgaaaagaaatgactttaatgtcccataacgcggcttacagcttccagcacttttgtttcctcaaacggcttaacaataaaatcctttgcccccagctcaattgcttccgttacaattctttgctggcgcatggcggtgcacatgatgaccttcgctttaggatcaaaggttaagatatcacgaagcgcttttatgccgtttttcaccggcattgtaatatccattgtcacaaggtccgggcgcagttttttatacaggtcagctgcttgttcaccgtccgccgcttcgcctgcgattatgtaatttgcctcttccaagatctctctgattttcactctcatgaacttggcgtcgtctacaactaaaactcttgtcatattcccctccaacaatcgatttccacagataatagtcttattgtaccaaaaacaaaaggattagtagtagtacgaaagtaatttaccgtcaaaaaccagtaaagcctccaaaaagatctgacagcaaaataatgatcaggctcatccaattaaagaataacagcacaccaatcacaatcatcaaaacgccaccagctttcataatgaaaagctggttcttccttatccacttcagctttgtgataaaaaaagacaataaaagaaacggtaccgcaaaaccgagtacatataacatcatgtatggcaccgctgagcccggattggtgcctgcaagtgtgataacagcagctaatatcggaccggtacatggtgtccatccagctgcaaatgccattccgattaagaccgaccctaaaaacccgcttggtttatgcttaaaatggattctccgctctttcatcatagcctcaggccggaacacaccgagtgtaatgaaaccgaacaaaataataagcaacgcgccaatttgccgaatcgcatcgtgataatccctaaacaggctgccaataaaagatgttccatagcctaaagcaataaaaatgactgaaaagccaagcaaaaaacacaaagtatgaaacaagcttcttttctgcagcagcagcttttcagtttttacatcgtccatgctgacccctgtaatatatgacaaaaaagctgggtaaagcggcaggcagcaaggcgaaataaaggataaaaaccccgctccgaatgtcaaaaaataattcacgtctcccatgtcatcatcccttcatgatttgacattccttcaagttatgacaaaatcatttcatttttttaacactttcacttgaaggatttctattttcagaaaaaacttatataatttaatttgacattgagacattatactccttctcatttgaaaattagtataaatatggatataatataaacattcactttgaagatctaatgtatgaaaggatacatccctgtgattagagagcatctattaaaagaaattgaaaaaaaaagagcagagctgctgcaaattgtcatggcgaacggaatgacatctcatattacgatagagctcagtcaggagcttgaccatcttctcatacaatatcaaaagcagcgccttcgagcagtagcgggtgatgaatgattgcaaaataaaaaacccgtataagggttttttattttataaccatgtttctctatatcataatctttacgtattatttcgtttgattattcatggctttcatcatttgattgattttcttttgagaaggtttcattcccatttgcatcatcatcatgcgtaacatttgttcattaataggcggattctttttcaggtagctcatcatatatttacgagcaataaaaaacccgagtgcaacacctatgagcaatgcaacaacgcccactaggatgccaacccataaagtcattttatttcctccttcatgttgtctagtttaaagtgtactaaaccaaaagctattatacaacatttacatctctttttcttcggttttagacaaaatttctttctttcaccggatttagccatccgtaacgcttcgaattgaaatccattgctaaaaagcaagggctaacttttcttaacacttcaaagaatatcgtttctgcctcgtaatctcccgaagccacaatttctatcatgtgctccttcatcataaacgtcgcgtggccttttgctttcggcaaagctattctataaatataatccagctgcctgtaatccgtcttgtttaaattcatttttaaccgctgatgcatatgtaaaatcgggattggttgtgtaatatattgaatctgtttctctgtcatttcatactgctgcttttcaaggcttgtccaatgatagtcttgaaacagctcaaacataaccgattcccggccgaaatagtgattggcaaattcctctttgatcaggtacgtatagtagtgacgttccatcttttcatccccttttccagcagcatttcatttgctctctattatacaaaagaagaaaagaaagaattgtctattactgttaaaccgccaatactatttttgtcggataaacaagaaaaagaggatgatttgactcatcctctttcaaaagcttacttattgattaatgccttaactcgattcactacgttcggaactgagaagccgtattcgttaatgatggtttcacctggagcagatgcaccgaatcggtctatgccgagaacgtcaccttcaagccccgtgtatttgccccatccaaatgatgagcccatttcaattgcaagacgttttttcacatctgcaggaaggacttcgtttttgtattcatcagattgtttctcaaaacggtccattgaaggcatgctgacaacagaaacatcgatattttcttttgccaattcagcctgcgcttcaattgcaagacctacctctgatccggaagcgatgagaagagcgtcaggtgtttcgtttttagatttagaaacgacatatgcacctttttctactcctgccaatgcttcttcagatgtttgatcgatggtaggaaggttttgacgtgtaagcactagcgctgttgggtggtcagtgctttgcactgcaagcttccatgctgctgctgtctcatttccgtctgctggacggatcaaagaaaggttaggcatcgcacggagtgaagcaagctgttcaacaggctcgtgcgtcggaccgtcttcaccaaccgcaatactgtcatgtgtgaagacatatgtcacaggaaggcccattaacgctgcaaggcgaatcgcaggacgcaggtaatcagagaagacaaagaaagttccgccgaatacacgaagaccgccatgaagcgccataccgtttaaggctgcacccatcgcaaattcacgtacaccaaaccagaagtttttgcctgagtaatcaaccgctgtaaaatcaccggcatttttaattgtcgttttgttcgatcccgctaggtcagcagaacctccgacaaagaaaggaatttttttcgcaagtccgttgagaacttcaccggaagatgcacgggatgccaggctgcttcctttttcatacacaggaacctcttgatcccagtccttcggaagctctcctttgattgccagttcaagctgttcagcaagttcaggataaacttctttatacttagcgaattgagcattccattcttgttcttttttctcacctgattctttaacagctgcagcgaaatgctcataaacttctgacggaacgtagaagtcttcttcatatgtccacgcgtaagcttcttttgttaatttgctttcctctttaccaagcggcgcaccgtgaacaccggatgtaccggcacggttaggtgaaccgaatccgattgtcgttttcacttcaattaatgtaggtttcttttcattttggcgtgctttttcgatagccgctgttaattcttcaatattgtttccatcctcaacataaagaacttcccaattcattgcttcaaaacgctgtttcacgttttcagaaaatgaacggtcgaggtctccatcaagagagatgtcattagaatcgtatagtacgatcagacggccaagctgaagatggcctgcgagtgaagcggcttcagaagaaataccttccattaaatcaccatcaccgcaaatactgtatgtataatgatcgactacgttaaatgaatcgcggttgtatgtttccgctaaatggcgttcagcaattgccataccgactgccatggcaattccttggccaagcggacctgttgtagcatcaacaccggcagtatgtccgaattccgggtgtccaggtgttttgctgccccactggcggaatcccttaagatcttcaatactaagatcaaacccgcttaaatgaagcatgctgtataatagtgctgacccgtgtccagcagataaaacaaaacggtcacggttaaaccagccagggtttgccggacttacgttcataaattttgtccacagcgtgtatgccattggagcggctcccatcggcatccctgggtgaccagaatttgctttttcaatagcgtctattgacagtgtgcgaatggtagcaactgatttcttttcaattgtatccataaaaatccccttccttatgtgttgtacccttacatcataaatgtctgacgactttttctcaactgtttcagcttaaatttgagagaaacttgttgaattttgtcacataagagttttgattatagtatatgcaaaagaggaatacgatattgccgtattcctcttatattagtgaagtttgttatttcttttttctctttttagcttttctggtgttacatcattgccttctgggtcaatgattttcacgctttttaacgtgttcttcatagaagaacgaaaacctttcaagtactcttgacggagcttttgctgttcggctttttcttcttctgtaataacgccagctttagctttggcagcaagctcattaattctggcaattttcgcgtttgaaatcatgttaaactcctttattgcattttgtctatatagtactagatcaaaaaaagttttacaactgattcactctgctgtctctacattctctatgtattcctgaaaacgccggtgaacggttgctttagagacatcatagccaaatcctcttagggtagccgcgatttcagcaaacgttagtttattcgctcttaggcggacgatctcagagattggcacctctattttttcttttccactgttctcatgttggttttttaagtttttttgcggtttaaaaccgttttttactgcacgcttcattccccgtctgattttcatgttgtgaatctttcgctgatactcttccacaatgctgacgatttccaagaccattgagtcagcctccgataactccagttcacctctgtgagccgttgtatagactttcacaccttctctgtaaatacaatgaagcagtgcgatttttgcgtttccccgcccgagccttgtctcgtcctgaaccaaaatgacatcaattccagcgttcttaatctcatcaagcagctcaaatacaccatcccgatccatttcatatccgctggctttttctgaaatcactttgaccacttccatgccgttctccgctgcaatggccgtaagctcctcctcctgccgctttaatgacgtttcctgctgttctttatttgtgcttacacgggcataaatgagtgctttcattttatctctctttcctctctatcttacagttgccaattcatatgcatcctgatgcttctttttcaatgggatcactaactcatcacccggctggatatcagaggtttgtagttgatttttatcagctacccattcaataaaatcatttttgtttatcttttttgtatctgctacctgatcagcaattgaccaaagtgtgtcgccttgctggacttctattttaacatattgattaagctcctggccgctgcttgtatatgacagcataaggataaccgcgctcaaaatcactgtgaacagaccgacaaaaataatagattctttactcatgatcataacctccaacaggaatgtttgttcgcatttttataatttcagtatatacgaacaaacgtttctgtcaattgttttttcgaacctatgtttgtactgtaaggaaaatcatgctataatcttcttaaaatcgacgttttgaggtgcgaaaaatgacgaagctatcaaaaaggcaacttgatatcctccgttttattaaagcagaggttaaatcaaaaggatatccgccttccgtgagagagatcggagaggctgtcgggcttgcgtccagctctactgtccacggccatttggcccgcttggaaacaaaagggctgatcagacgagatccgacaaaaccaagagcaatagaaattcttgatgaagaagtagacattccgcaaagccaggtcgttaatgtaccggtcatcgggaaagtcacggcgggatctcctattacagcagtagaaaatattgaagaatattttccgctcccagaccgcatggttcctccagacgagcatgtatttatgctggagattatgggagacagtatgatagatgctggtattctcgataaggactatgtcatcgttaaacagcaaaacacagcgaacaatggggaaattgtagttgcaatgacagaagatgatgaagcaactgtaaaacgattctataaagaggatacccacattcgcttgcagcctgagaacccaacgatggaacctatcattttgcagaatgtcagcattctagggaaagtgattggcgtgttcagaaccgtccattaatctattgatctatcagatgcataaaataaccccctcttcctttacggagagggggtttgttgttcaaaaaaagcaggctcgccctgacttttgggtgcgagcctgaataggaggaaaaagaacatcatgtttacaccataattatccaccaaaagattgttgaagtcaagaaattttctttcctttaggaaacttttatcaaaatatgaacatttaaaatattagacgccatcttcttaaaaacgtttcattttttaggtcgtggaaggatacggtttcatatttattaaggggcgaagcaattgaaatatactgaaaattcagtacatagtttaattagttcaacattctgataaaacagctcgctttcttcatataaaatgtaatatgtatttcaatttcaccttcacccaatcacttgtccagttcaaaagatatggcatcgttgaacaagtcgggtagaaaccttccccaaacataaagtctccaccaacacccttctttaaatttaaccttatatgaaatatggttgtgatatcaaaagtttcatcataaaaagtgcatatgcgttttttcttgtttgtaatatcgaagcctgtcttgaagggttccggtatgaaattcaaatttgtggccgtcagggtcggtaaaataaattgattttcgatcgcgttcatctcgttctctgccaggcagaatattgacatgaagtctttttaatttagctgatacctcctcaaattcatgatcttcaattgtaaaagcaatatgggtataagaaagcttaatgtcatttctcgggatgtctggttcttcattaagcgctagccagatgccgttcatgtcaaaatatgcagttgttcttccctttaccaaaagctttgcatcaaacactttttgataaaaatcaatcgatgtatccaaatgcgaaactgaaaatagcaagtgattgattccttttatctccacaaatcattccccccttgaaagctgatcatccacatatacgtcttttttcataagaaagtttcatactgctgaaaaaaaataccagtgtaaacaaaaacggactgtttaaaatagtaacatgaccattatgaatggttttgaattgcattatttatcatttgtttacgcccaagaattttcttcaaaaaataacaatttaggtggtcaaatgaaacatatcattgcgcttgcttcaaagattgctttcactctcgcccttttatatgtgattttggacagagtctatcacgcatccttcttaagtgtgatgtttattgcacttttcttaggttttgtttcctatctttctggtgacatgctcgtcttacccagaacaaacaatattacagcttcattggctgactttggcctttcattcgttattctttgggtatttgttttaacccaaacaagaaacgatttctcaccatttggagcagctctcctttccgctgcctgtcttactgtttttgaattcttttttcatcggtatttattgaaaaatgtacttgatgaaaatttccgaaatgaactgtcagcgagagataacacgttgcagtatcaaacggaagccgcggacgagctgtttcccgaaacgaatgagaagcataaagaataggaggctgtcttatcgcctcctatttttcagtagctatatttgagaaaacggaacatcacttctgtaaacttataaaacctctcattttgagtaacagctctgctttttaaagaaaagatgccgaacaaagactttcgaaagcctgtgctcatttctatctggatacttaaacctgtttttgatttatttgcaatgttattcggactaacgcccgcatgtggatggtccgtattgagcaatacagcaggaaaaccggcatgctgcaatttctcaactaaatctgccgctcttacgcgatctgtaccgccgacttcgatctgctgatcttcttctgcgtacccgtgtaatgaaatgacatattcatgatttcccgtcattttaagggcccgaggttcatcaaagtgcgtgctcgtaatgtgcaggactgagtttcctgcagattttaagccttcaaataaatacatcgagtactctttgctgagctctctggctacttcacttgtcccaccttcaatacctcctccgtgaatagctaaaacaagaacagggcttccggtttctttcgtaacaacaccgtaatcagaaggatcttcattgttttttaattcctcaaaattctgatatatatcttcagcataaattgaagaaatcggagtaaataccataaaaataaacaataattttacaattttaatagttgatggaaaacgtttggctatgttacaatcaacatgcttcaaggaatggagcaaacggcggagcagggatactttggccggtttcatctactccgcctctaagtccaaatcaacaggatgtaggtctctttgaggctttagcacgaattctctcgtcctccttgttaaatttttgttaaattcacaatattatataccattagcccgggcgctgttcttctcatttttgaatttatgaaaagtaagctggcaccacctcccccatttccatacaaaacaaaaatgcacctgccctttggcctgtgcattttttattttctcttcattcttcgtttttttgcttgatttaatttcatgatgtttttttcaatttttcttatgtttcgcctttgcgggattgttttcatttcataataaacagaaataaacccgcttaatgtcactgctgcaatataaaggacgcgctgtttgatcattcggtcagcgtgtccatgatcattcgcttctttttacagcctttcgatcacagctttatcaaacagctgatcgacatacacttgtttcattcccactgcaaaccccgcagccagccaaagaatcagaaataaactgatataaaacaccataaacccttcctttcctgtcttgatgcggagcagaattttttaaaaacagttcatctattacaactggcagacgaagcttcttctttgtgttaggttctttcaataggctggttaatatgtgtaatgctgtaatgaacagttagaaattttattccaaacagccacatatgatgaacagccgttaatttgttgtcatgtgcagcttctatcagaaaggtttcagataaaggaagcggacaagttcccgctcttgtttgcagataaatcccctcatcacccgctctgctttttctccgcctgcttgttaaaaccagcttctcctgatgatgatatggttttaaaatacctgtcatgctgctgaatggaagcggtaaagaaatattcatatacccctctccatttgaacgatacactgaataaagagcggtaaaaatggtttcgtttttttcatttgttctaatccaggcacgtactctttcccttccgtcttttttcgaatgaacaccttttatcttgctgtacatcctataccagtcagggttcgtcgaaagatgtatttggccgattcttctgctgaaccattcgtaaataattgcaagcggccgaaaccacatgctccatgttacttttgctttaatattgtattcgatggtttgttcataaaacgaaagaatgagcggcgccagtttttctggtgaaaaatcttttgaacgcaggctgcccatatcatccacaagcccgctgtaccgagcgttattttcagcttgaatgttagctaaaaattcttctccaatctttctttttccgtagatacggctgaatgtctttacactgtctgcatcaaaaggcttcgcatcctctattctccaccctatgagagcgggcaagataacaccaaacgcattgacaaaaccgtgaatccaaatcatctgattgatggtcaatgtaacttcttgccgaaatacaccaaatgaataaatcatcgagaaagcaatcgttatcattaaaacagcggaagaaagccgaataagaaatgtccccgtcttggtgcgaaaagctgccgtgaacaccaaaaatgcatgaagataaatcgccgccatataaatgctaaccgcaatgacatcaagtgtttttgaatatgtgatgcccagtgcgataagaaggggcgaaagcaaaatcacccatgttatccaactgtacaacatccgatgttttctaatggttctgccgagtaatccgttgaagatcgggatcagaaaagcagaatagtgaaagtggacagcagtaagcaaaatgatgagagggccaaattgcatgatctgcaaatgggcagcataagcaaaaaaccaaaatcctcctcccgccaaataaataaggccgaacaaaactgatgtctcttcgattctatgtatctttgtttcccaaaggcggaggatcgcatacaatgcaataaaaactgtgtacatccaccagataagtgcgaaaactccaacctctgtcacaagagccaacaccgcaaagaatgcggctgccggatagcactggattagcccatattccataaactgagcagcacgaaccggcgattgacgaaaaacaaaagggaaaattcccggcacgaaaaatagaatggataacaaaacgagtgcctctgccactgaaatatccggtgcttccgctgcaagaaatcctataaaacaaagcgcactgactatgccatttcgttgcatgattcttcctcttcctcctgaaacgttcctttataaaagaaaagagtgccaagaattgtattttgcacatgcacttcaatggtgaaacaattctttttttcatcaaacgtttcgcaaactacggatgtaccggtcagccatttcggcaacgggattctttttccgcatatcaatagccattgctttcccgatgtgatcgtaagagagccgtcatgagatgcctcgaacgtcaaaacagacagcagcagatgaggtttgccgaagaaatcaagtattctattttctttctcgtcatatatcattatcgcgtcaaagaaacgttttttgcctttaaagataaatgtacgattccattctattcctgtatgttgtgatttcaaaagacaagttctattttgtattgtaaatggaatgtctttgcctctttctgaaaagaagcatctgaaaaaaacacccagctttaacagcattctaaccagaaaagagcctccgcttatttctgacatcgttcccgtcccgctgaatgtttgagacccgtctaattggtaccgtttccgcagcttgggatgcagcaaatgatagttaataattgatttttcataaatcgaactcacaatgtcacttctttctctttcgttttgtgcgcctggcactggggagctgcaggctaagagcgccgcttgcagcggaaaacacactcaacagaatccacatgaatatttcggaacctagacaagcaaacccagcaaaaatacaagcctggacaccatgaatgatccattttctttttaaaggaagcagccacaaaatagctaagcctatctccgctgttcctgccaaaatgcttgtttcaacacctgcaaagccttgatagaaccaaaacaggctgaaaaacagacacatgaacacatagatgatagcagatcgaatgaagcgcttcggatgtttattttgctctacccaaagccttaatgcatcaaagctccaggcagtcgcccagccaagcagcggccgaaataataaacgatcaatccatcttcccagcagtccgtaggctgttttgtattggtactgtgttaaaaacgtcattttcccattttctctctgtatatacttccagtagccgcttccatgccgaatcagagataatggatgatcagagccaaaagccagtgaagaagacctttcagatgaacatttgttgaaaacacggacggtttctcctgtacctgacacctttaatccaaagcctacccttgtttcgtaaagaaacttctgtttttcgcatggctgactattcaaatacgtaatatttgaaaaccggagatcccattccttatgcagtgatgggttttgtgtatattcccagagtgtatccagatcagatttcatttcgatttctacataaatcggtttctgcctcacagccccttctcccttctatttcaagcaattcctatattagcatattggtcgatttgaaaagtgtatatctctccaaaaaaagtatctttatcctaataaatgcataaaaaagagaagagaggtttccttctcttccttgggattcattactgagttttaaccgtgccgaaatgagtaattgtgacgttcacactgtatgtgatgtcggctttactgaaggtgtcatcccagttatttttcacccttttccataagtgaggatatgtaagtctaaaagattcatcaaaacccgcaacatctgctttataatcatgctgaattttttttaatacctgaccaactattttctttacctcgttttcaatagtcgtttcgagacgatctataaactgggtgtccaacgcctcttttgtgttccagttttcaaccaaatcgccttctgattcaatatcgacatggaatgaaatatctttcccttttacgattggctgaattctgcttttgattttattgatatcgtacgctaacgtctgttggctctttttatcatgacttttgacaactccgcctttcccttctcctctaatccatgtaatcccctcagtttcatattcatttaaggtgcctatcatttttttcgattttccgttgattacagctgctccggaatacttgaccgctccattcgccgcaaccacattttgcagtaaaaagctgctgccagaataatgatgataatcgttgcctgagcggttgtgattttactggttgggctgaacatgagactttatcaccatcctgtcgagttcatcacttcacccgttttgtattatctgtattcatcattttaggccggcgcttcatgactaaaagaggcattctgataacaaagtctttccaatcttttaagtgatagggcactgccggacttgcgtatggcacaccaaagctctttaactttacgacatggctgcttagcagcagataatacataatgactccaaacaatccaaacaccgccgcacaaaacatcgcgccaaaccgaagcatccgaagtgctatacctgtgctataatgcgggatggcaaatgaagaaattgctgtgagcgcaacaacaatgaccatgattggactgacaatccccgcctgcacagctgcttcccgatgattaatccgccaactatgccaattgcgggtccaatcggttttggcagacgaagccccgcttctcttaaaatttcgatcgcgacttccataaataaggcttcaatgagggatgggaacggaacaccttggcgcgtcccggaaattgaaattgccagcttggtcggaattaaccccggatgaaaagaaataaatgatatatataaagcgggtgcgaataatgttatcattgctgcgatgaacctcagcaatctgatgagcgagctcgggaaccaccgttcataataatcttcaggcgattgaagcatcatgctgaaagtgactggaacaatcaaagcaaacggagtgccgtctagcagaatagctactcttccttccattaattcgcttatgacgcgatcaggacgttctgtactctgtacttgcgggaacgggctcaaataattatcctcaattaactgttcaacgtagcctgactccggcaaatgatcgatctcaatccctctcactctttttcttacttcctcgactacttttgggtctgcaatgtcattcatataagcgataattaaatccttttttaatcgtgttcctacttcaaatctctgcaatgttaattgatcattttttccttgctgtctcaaaagagctgtattcgtactcaactcttctgtaaagcctgtgcgcggtcctctgacaagcgcttctgaaagcggctccttgatacttcgattttgtttttttacagttcccagaagaaacgcctgcggtattccatcgatgagaagcgctgtcgaacccatgaacacattcaacacgatatcactgattttctctgattctatgacatcaccgattgatttgattttttatctgtttcgaagttaaagtacctttgccggattgagaaatttcatcgcttacctgattaggttgattcataactaacactgatagacctttattaatcaattcctgatcagacagtccttcaacaaagatcaatgccgcttttacatgtaaatgagtgatttcaaactcactgaagtgaacgtccccgttatgtcctatttttctttttacattttctaaatcgtatccgatgttaccggttaacacatcctgatcctgcttttcagctgtcaaataatctgatttatgctgcttctgtgttttgtattgattgttccgccacctcatcattgcaccttcttatacatgaatccaagtaaacactttatagattacatatggaacgagaaatactactaacgcttgaaaccacacattccagtcagtaagtgttgatatcatgttatccatctgtcatttcccctctctctaataggattatttttcccgtatacctattttttatgttcgtcttttttctcaataaaaaaagcatgatgaacatttcatcatgcttttaaagaaatcaacctgaccattttgcataattaacacaaaatgagccttttagcagtctgggaaaactaaaattccagcttgaagctttctgcctgatctgaaacttccacaggaatccccattatcgttttcggtttggaaacgtaaacaaagcgcatttcctcctctaattgctgaaacgctttttcactaactaaaattctggccggcttccctggactgttatcaatggctgctttgatttttccaagcataaaaaacctcctgttttagaaaatggatcatttactattaaaacaaaaatcgcaaaataaattgcctgaacaggaattccggttcaaacatagcagttgcggctgcaaacaagaatgaacgaaatgacaacatacacctctctctctttttcgcgcatgcagaattctcccattcacagatcagactggcgactgacacgctgttcaacagcagctctagcataaataatgcacgctatggacatgatcttattagttattatatgattgaattgaaaaaacatcatatgtcaagaggtaaacgaaatggctcaaaacaacgaaaatgcattaccggatattacaaaaagcattactctggaggctcccattcagaaagtctgggagacagtctctacttcagaaggcattgccaagtggtttatgcccaatgactttcagctcaaagaaggacaagaatttcacttacaatcgccgtttgggccgtccccttgtaaagttttggctgttcaagctccaactgaactttcttttgaatgggatacagaaggatgggtcgttacctttcaattagaagacttgggggaaaagacagggtttacccttattcacagcggctggaaagagccgaatgaagtgatcggcaaagcaaacgagaaaagctccgtcgttcgcggtaagatggatggcggctggactggcattgtaaatgaacggcttcgtaaggctgtcgaagaataaaaaaagagagaggtatctctcttttttgttctttcccaagggttatacttcacaatttgagtccatcaatcataaaacgtaacagttttagatttaccagagtaatcggtaacaaagaactcggccttgttattgctcccatctacaaattttccaatactgccaaatgtgtggcattctccgggtgaaaaatagtttgcccctacataatcatcaggattgtcaccgggatcatcctcatataagtgcagtgaaacagaaaaaggagtgcttcctgaaaggcaaactctaaaatctcctccggtcgagtataccgtcggacttgagtaagtatatgtgtaagtccccaacttatcccactctccagcccccgcagttccggctttttctgcttgtgccgttaatggaaaaaccgcagccaaccctaaaacagacaaaaatccaactaccttagtgaatctcatcaactacaccactcctctatttcaatgatagccgcagatacgtttgtatcatttccggcagagctacataattgatccagcctgcctccctgcttcttaggcaggtggcattggacattatattcagcagcagccgttttatgaatccgtctttgtctggttttaaaatgttcaaaataaatgcattcccatttgtactgctatctcttataatttgtttaaaaggttgtacttcaatcagggggaaaaggatatggaattaagcttcacaaaaatactcgttattttgtttgtaggttttttagtatttgggcctgataaactgccggcgcttggccgtgcagcaggaaaagccttatcagaatttaaacaagcaacaagcggactgactcaggatatcagaaaaaatgactcagaaaacaaagaagacaaacaaatgtaggataaatcgtttgggccgatgaaaaatcggctctttattttgatttgtttttgtgtcatctgtctttttctatcatttggacagcccttttttccttctatgattttaactgtccaagccgcaaaatctactcgccgtataataaagcgtagtaaaaataaaggaggagtatatatgggttattacaaaaaatacaaagaagagtattatacggtcaaaaaaacgtattataagaagtattacgaatatgataaaaaatatgatgactgtgattacgacaaaaaatacgatgactatgataaaaaatattatgatcacgataaaaaagactatgattatgttgtagagtataaaaagcataaaaaacactactaaacgccattaacatctcctcgtttttactttcccccggctattgccgggtcttttttgtttgtgcactatatgtatatttctgaagcttccctttatatgaaaaccttggtgactgaatctgaaaaagaatagtgaatatttagtacatagtttagttagttcataagtgagcgcattcagtttattgcagttacaaagaaacttttataaactctttgaggatcatacataaaaggagaggttttttgtatagaaacatcgtattttatctcattttactttgtctatttatatcagttgtcatgaaaagctttgaggtgataagcacaatagccaatgttatctgctttgttttcgtattgctgtattttaaagatgaaatgaaaacatactcacgtaaagcgttagcaatcctaagtatttgttttcttttcttagtcggtatctgtgcttttatcattttacaaggacagacattgatgaaacgtcacctcttttttacaggcagggaaacgatagcgggcattcttttaataatcgtttctttaagcatttgtacttttattttgaggagaatttcaaatcggttaaaacgattgtgatctcattctttcctctgataaaggtatatagctttcagattggcgaagcgtttcgtcccttacttcactcaaaatgaaatattttgtcgattatatacatcaatacagttccaaaataaggtataataaatggccaaaccactatcaaaagggggaattttggtgaaaaaagtattgattgcaggtgcagtaggaacagcggttcttttcggaaccctttcatcaggtataccaggcttacccgcggcagatgctcaagtcgcaaaagcagcatcacagctgcctaagggaatcggcggccgcgcctatctgaatagtacaggcgccgtttttacagctaaaatcaatcttcctgacactgtaaaatatgatacggtctctactccttatatttattcaggatttagggcaacaagcggaactgaggccgatatcgggcttcagtacagcaaacaatacaacgtctggaagcccctcatgaaggttgggtccaaaaatgaagaaacgtacatcgaaggaaaagacaaattcacatacaataaaggcttccgccctggaagcacagtccaaatgacaatccataaaaatttaagcggcaatacgcgcatgaccctttggggaacgaacaatgacggctacaccggacggattatcacagaaattcaaggaaccaacatcggcacgatttcaaaatggaaaacccttgctaccgcggctgtttcgtatgaaagccagcgtgatgcgatcaaagcaaccttttcgacatcttttaacaacatcacaatcgacaataaagccgtcactcctgtggtagatacacaggatttcgcaaaggtttctgttgcaggaaataacgttacgatctctgttaataaataaacgaagcagcaaaaatccgccagcattgtctggcggttttcattggagcatactggtcatagttcgtttcttcagctcttttgtttaaacctaactttaataagggtggaaattggtatgaaatatgaaaaaacaagtctttttggaatgattttagttattgtagcacttctaatatctatatattttatgtgtaatacaaatgcgttagtacctgctggatatgatctagctattcatggaattgtaatatctagaactataatgattgcttttactttgtatttagtttcaaagttaggatattttcttctgaataaaaaagattaactgtagagttaatcttttttatgtattatacgtgtttgtccttcgatttttattcatcttccagattgcttaatgaaattaggatacctgctatccattcactgcacaataaaaaggcagcattaaaccgctacctcaaataaaagcttgtccccatgtttatagttgattaacttgaaatcatcaatggtaaagttataaaaatctttcacttcaggattgatccatagttcaggtgcttcaaactgttctctttccatttgaattttcaaattgtctatatgacgtgtgtacacatggcaatccccaatgttaaagatatattcaccaagctcataaccagtcacttgagcaatcatgcgctgcaacacattgtactggaatacattgaagggatttcctaatgccatatcattgctccgtgctcttacctcaaggtggagtttcccatgtttaacgtaccattgtgtctcgtatacacatggcgttaaggacattgcgtctaaatcatcaggattccacagcattgtaatatgtctgcgtgaagacgggttgttcttcaattgatgaagaagatagtctacctgatccactttttctccgtttagacttctgtttttcttccccagctgaaatccatatgcatgtccgatggtgccgtcttcttgtttccactgatcccaaatatgtacgcccatcttgtttaaatcattaacatcattagatttcagctgccaaatccagagcaactctttaatggctgttttccaggcaaccttttttgtcgttaaaatcggaacctctgagttgtcgaatctcatttgcttactcattacacttagagtatgtgccggtgttccatctgagtcccacttggttcttacatcaaactcttcgtctgagattccattattgataatatcctttataattgaattgtattgtttatcgaattgcgtcatgactattcatatccttctttcattttcagttgctaagcataatttattacgaatgcaatattatcgcaaatactaagcacttgcagataaagtgaggatcttattccactcactgtgtgtttaaagaggagttaatcccccctcttttacacctgtatttctccataacatagtctgtcacatagctcatagttaccgccagtttggtacatacaccgttgataacattgttgaggattataagaaatggtttgatattgcggcacataaaaattcaaatagttaggtgtttgtgtataccaaattggaaattgtctaaacacattaaatcctccaatagctttttctgatttaatgcattgtattttacctcaatatcaattgtcatttgtccatgtgcaattgggctttctttaaaataaattctctctaatttcattcatttgatcattaacaacttttttatgatatttggcagcggttcattccttatatgatctgtttctgaccggttttgctgtttgtttttgatgtctaactttaaatccttcaaaagcagtgttaaaaaatcacatcatagagctctgaatcttaaccataacgttcaaatattcttcaattagagaaagtccctctttacgtatattaatcttctctatacactttactattattttacagtggttgagtgctttctctcgcttttgttttaataaacagctatccgttttgtttttcagaaagtgttttaaacagcctctttttactattcttatttcatttgaccataccatatcatttaaacttcataaattaaattcgaataacataaaggaggaatttaattgggttattataaaaaatataaagaagagtattacacttggaaaaaaacatattacaaaaagtattacgacaatgataagaagcattatgattgcgacaagtattatgatcatgataaaaaacattatgattacgacaaaaagtatgatgaccatgataaaaagtattacgatgatcacgattatcattacgaaaaaaagtattatgatgacgatgatcattattattatgattttgtcgaatcatataaaaaacatcactaaatctcttaaacgtctatttattccccggcgacataccgggggcttttttatgatatttatcgacgatactcagatttttttgtgctcatggctgctgtaaattcaattattaatgaacacaagtcatttaacttggcttattattagtggcattactagtttttagttgccttcccctacttataaaaatttagataaaagtatttctttatagagatgcttgtttcatcgacaactcaatcctaaagtggtaaaatcaataaaatgtaaaaactgtaaatataataaaaggagcatctatatgtatataagtattataattttagcatccatgcttttatggggcgcagttatccacgagctaagtaaaccttcaaaaaagcaaagcaccagaaaaattgtttctttgacatctttaggttctttatcgactttagttattactatttcactttttcaaaacttccctttttaaaatttgtttttaattaaatccttcgtattaaaatattcattttatacataatatttatatgtaccttggctgaaacctccattgatcaatcacacagcatgaagacagccaaggatttattttgtttacttcgtacctgttgaaccgagtcctcctctatcctcgtttcccaaatgctcgacttcaaccaattcaaccgccggcattttcttcatgattctaaactggcagatacgatcacccttcttaatttcagtatcacgcaatgcataagcaggaaagaaccagaaatcgttgtctcccttatatgactcatcgataacacccattgaatttgtttgaataacgccaaagttcttatatgtacttgaacgagggacgacatgtgcttcgtaaccttcaggcagttccattgcaacacctaatgggacaagcttaaattcatcttttttgattgttacatcttcagctgcccgaagatcaatccagtctccctgctcaattttgctgattcttgtttgtgtttcatctagatacttgattttaattttcattgtcatgtactagctcctttaatttttattgactatcatacagtaaggcttgttcttgtgtcattttcatcagtgataaattgaacgtcttcaaaatcattctgtaaagcattgaagtaaagtttttcaatgaattttttgtttttacagtaaatcgaaacgtagctattatctgctatcaacaggacaagttcgcaatcactgtcagcaaactcttcatatgtattgacttgattaaccatttttccatatggaaatgctttcagttcaacgaaaatggtatagtactgattcgtttttaattgttgctcaaaaactgccccttcaacaattgcgtagtcatgaaaaagctcctcatcatcgagctctccttctacaacaaaataagattccccactcgtttgccacctataattagctatttctaccggccgcagtattctccatagaaaatttccatattcattcggtatttaaaactaactcccctattcatgtataccccttacttaaacgatttttgtgaatacgagtttaattatatactctgatgttaggtttatggaacaaggaatcgactgccttttcaaccgattatcttttacagaatttcctcagccctcctcatttaaaaggttcttcaatgttcataacaatagacgccctcttgttctcttgtctttgtcgagaaaagttagccagtcagtgccttcatatgtagtgtcctgcttgtctcagaccgtacttgattacgctttaatcatcctgatgttatgacatgtttactccgtcataaatattcaccagaaataaacataccctttttgtatttcttgtgaattataggatttcccaaaggtctttccaactctttaccgaatgtataaatttgtaatttatttcttatataggagatgaagaaaagtgtttaagaaaattgtggtaggttcgattttagttagttcaattacaggattaagctctacttatgcttcagctgcatcaattgaccacacacctaaaaaagtcactgcgtttgccgcacaatccgatattatactagaagaggaagaaacgtttagaggtgacggaaaattttattttgattattatggaagtgaagatggcgaaatcagagtttttgttgagaatacaggaagcaatccatttgaattcaaaattgtaaaaccaggtggtggaacaatcgcttccggctatacagttaaacctggcaaaagtgtaactctaactcttgacgtatcacactataaaaccggaacatattatattcgctgtcaaaatgatgatggagctaagataaaagcttttgcaaaagtgcgtgctctctaataggaatacaatggagcaaggaagcttgttgttacttccttgattttttctgtgcttctatactgcaaacatcactaattctaacctgtatcctttgtattgatgaacggtaagtttttcctgattagatttctcgttatcatctacccttagaaaaaaatgtcccgaaacaaataatcatttttgtaatcctcggtcgccgtacccattaacaccccacttacaagcctcatgtatcccgtacttgcttttattcgaacattgataggcaccttctcgtatcacatggatttgctgttgaatgatttcaaataaagttgaataaaataagatcgaatcatccaacaattaacatttattcttgcggcaataggtggtatttataatccataagaaggaaggaagcgttgatgataaagctttgccgagaagtttggatcgaagtcaatcttgatgccgttaaaaagaatttgcgagcgatccgccgtcatattccacataagagcaaaattatggctgtcgtaaaagcgaacggttatggtcacgggtctatagaagtggcacgccatgcactggaacacggggcgagtgagcttgctgttgccagtgtggaggaaggaatcgttttacgtaaagctgggattacagcacctatccttgtgcttggttttacatcccttagttgtgtaaagaagtcagcagcttggaatataacattatcagcattccaggttgattggatgaaagaagcaaacgagatattggaaaaagaagcgagtgctaaccggctggccattcatattaacgtggataccggcatgggacgattaggtgtacgcacaaaggaagaacttttagaagtagtgaaagccttaaaggcaagtaaattcctcagatggacagggattttcacacatttttcgacagctgatgaaccggacacaacactcacaaagctgcagcacgaaaaattcatcagttttctcagctttttaaaaaaacaggggattgagctgcccaccgtgcatatgtgcaacacggctgcagctatcgcttttccggaatttagcgctgatatgatccgtttaggtatcggcttatatggtttatatccttcagcctatattaaacaactaaatctcgttaagcttgaacctgcgttaagtttaaaggcgcgcatcgcttatgtgaaaaccatgcggacagaaccccgaaccgttagctatggtgctacatacgtcgcagagcctaatgaagtaattgctacactcccgattggctatgctgacggctattctcgtgccctttccaatcgcgggtttgttcttcatcgcggaaaacgagtgccagtggcaggaagagtaacaatggatatgatcatggtcagtttaggagaaaacggtgaaggtaaacaaggagatgaagtcgtgatttacggtaagcaaaaaggagccgagatttccgttgatgaagtggctgaaatgctcaatacgattaactatgaagtcgtgtctacattaagccgccgcatccctcgtttttatataagagatggcgagatttttaaagtatcaactccagtattatacgtatagaacatcttaaaatgctgaatcaagatccctctaccagggggattttgttttttctgaaactaaaaaaatccctcctataagaagagagattttcaacatatttatacctcaataactgattgttcaggagtattatgatcgtgtcgagaacgaaaatgctcttctaattcttcaagtgtacgcccttttgtttccggcatgaatttgtatacaaaaccgattgccaatacacctaaagccacaaatataaagaatgtaaaagacaaacctacagagctaagcaagatcgggaaagcaaaaccgatcacaaagtttaatatccaaaggaaaaaaacacttatcccagaaccaagtcctcttaacctttgagggaatatttccgctatgacaagccaagtcacaggtcctacacacccttgcataaaggcaagaaataaaacggtcaaagaaagcactacataaggaagtgccatagatccatcaagcacaattgagaaaatcgcaatcaataggagagctgtagtcgtccccgccaaaccaatcaataatattggacgccgtctcacttttccgaccagccaaatcccaaatataactgcaataactgatatcagcccatttccaatattagcgattaaagccgcttttgtaccaaaaccagattctttaaggatttgtgtgccataatacataatcgagttcacacctgtaatttgattcactatggcaacaccgattccaatccataaaagacggcgcagccatggtgtagaaaagtccttgagtgatgccttttctagtgctgtatctttttctaccgcttcttgaatttctctacattcagcttctgcacgtttatcttctcgaatttgtttaagaactcgcagcgcctcactgtttttgcctttggagattagccatcgggggctttctggtaccttaagcatactggcaaataacatgatagccggtacagcacaaatgacaagcatgtatctccaaacatgtcccgtatttgccattgttacaccgaggatcgcattaaaaacatatgctaaaaattgcccgccaacaatcattagttcattttggcttaccatacgccctctcttctcatgcggtgccatttctgctaaaaaggccggcaccatcgccgaggctcctccaacagccagccccagtaaaaaacgaaaggccaccatgatgaaaacattaggtgctaacgctgttcccagtgatgccaggaaaaataaaaaggaaagattaaggatcattttacggcggccataacgatcagccaatcttccgcataacaacgctccaaacgcggctcctaataaaagaatactcgtaacaagcccttctgtaaccggtgttaaatcaagctgatctggccttgccataaaaggtaaagctccatttataactccggtgtcatatccaaagagaagccctccaaaagttgctgaaatcattattaatttcaaccttcgatttcgatgttcattcatatccatttcccctgcctttattaagaatacttaataagctctttcagtgtggatattgagtcaaaactaaagtcatctctatcttagattttcgcctctggatttgtaaccgtttacattttagccaatagaataaacctaagctattagttgttatgttgtagtaatgtttttgtcacattattgtcatttctcatattatcataattctaaaagcattttcagtcaatattattttcaggattatttatttccgctatgtgatggtgatgttttgatcatctcgttgtgaagttaactattggcaatttggagtgttataagttcccttgaagttttccattcacaaaaaatgtccatatcgttataatgatgatgtttaatcgcaaaaagagaaaatgataaagagggaatcaatatgaagaagattttgatcagtatgatcgcaatcgttttaagtattactttggcagcttgcggatcaaatcacgcagccaaaaaccattcagattctaatgggacggagcaagtctctcaagatactcaatctaatgaatatagtcagacagaacaaaaggctggcacgcctcattcaaaaaatcataagaaattgatcgatgttacattagatagagcaatagatggagatacgattaaggttatttacaacggaaagaaagacacagttcgctacttgctcgttgatacacctgagacgaagaaaccaaattcttgtgttcaaccatacggtgaggatgcgtcgaaacgaaataaagaattggtcaacagcggtaagctacagctggaatttgataaaggcgatcgcagagataagtatggaagactgttagcatacgtttatgttgacggcaaatctgttcaagagacattattgaaagagggattggccagagtagcatatgtatatgagcctaacacaaaatacatagaccaattcagactagatgagcaagaagcaaagtcagataaactgtcaatttggagtaagagcggttatgtgacgaacagaggatttaatggctgtgtgaaatagaaaaacactgtttgttaaaaaaagcagcaaacctagcagaatgcagtttccaaagaattagaaagagatgatggcgtgtctagtttccattctgcttatcaagctaaaatcatgcaactagcctgtaaaatttccactgtatagtaacaataaaaaacaccccttcacgtcaatgtgagggggttatttgtgtgtaaacatccttcctatttcatcataaatcaagagatccctctaccgtcgttagcacagtttcatatatcttacccattggcattcctaagctttctcacttcttgaagtgttcgctgacagaatacggttccgctcgttcgttttgtctgctggacactccaatactgtttaaaggttgcgataccttattctcaccatcttttcaaaagaaggcagccatgtcatcaaaggcctttgatgatgattgatcattaattgttcttcggttgatctccagacaataacatcattagttttttcgaaagctcttcaaagcttgattgagatcctttgtgtgagtataaatgttcttatacaaatcaaatagtgttttatatttttgaacattttgcgcctttggataaaatgcagcagcctcacgaatgaactgctctgcacattcttcaagggattcaaaccatccgcttccaaaggcagccagcattgcagcccccatagctggcccttgttcattttctaacttaattaccctcgtattgaaaatatcagcttgcatttgcagccacgtatcatttttagctcccccaccaatagaaacaacagtatgaactgattttcccgcttcgcggaatagctcaattgattcatgtaaagagaatgtgataccttccattattgccctcaaaaagtgctttctattgtgggctccatccattccgatcaagcttccccgaatagaagaatcagcatgcggcgttctttcaccaaccaaataaggagtgtatagcagtccattggctcctatcggaatagcttccaccccctgcaataattgctcaaacgattcgtttggtgcaaacgttcttttaaaccagtccaagctgtatcctgcagcgagcgtgacgcccatcgtataaaaagaatccttttttccatgattaaaaaagtggactttgctttaaagtctctttctttttcttcttcgtaggaaagtatgacccctgaggtcccaatactgcataaagtttttccggaagaaaggatacctgctccaatagcgccgcaagcattatctgctcccccagcgtacacttttgttttttctaatagtccggtcttggcggcaacgtgcggaagcagcgaccctacacaatcatgagattcaacaagcggaggacaaatatctgcagaaataccaatttgattgcaaatatcattgctccactccttgcgagtaatatgtaaaagtaaagttcctgctgcatcggagtattccgtgtgaatggcaccggtcatacggaatctcacatagtctttcggaagcaaaaacacagcagtttttttaaaaagttcaggttcatgttccttcacccataacattttaggtaatgtaaacccttctaaaacacggttttttgtgatgtcaagaagatgatcgccaaatttctcggtcatccttatacattgaggcgttgttctggtatcattccaaagaattgcattacgtaacacctgacaatctttatcaagcagtactaatccatgcatttgtcccgaatagcttatcccgtcaatatccttggcttgaacattggatatagaaaccaattcagccaatgcttcaattgtttgctgcacccagtcttcaggattttgctcactatatcccgccttctcttggataagcggataccttttggacgtttctgcacaaaccttgccgttttggttaactaaaatggttttaacagcactcgttccaagatctattccaatgacatacttcattttttcactccttgcccttttaaaaaaccattcactctaaataaatcctaattatagaagttacccgtcataacaacaagcaataggaaaggaatcatgacgggtaattcagtgacttggtattgatagcaggatctggagcttatcctgttatacttctaaaatgtattggttcaatatcgcttttaatttctcctgtcttccagattcgtttttaattaatttatgatttagcgcatattgctcaagtgtgtgaaaattagctcttccttctataatttcaagaccaatcccttcagtaaagctgcggtaacgatgttgaatcacatcttcaaacacacgatcttcgattaatttgtgggcaactttcaatcctcttgcaaatgcatccatccctgcaatatgggcatatattagatcatcaggctcaaaagaagatcttctgaccttcgcatcaaagtttaatccgccgcttcctaggccgccattttgcaggatttcgtacattgctaatgtcgtagaatataaatccgtcggaaattcatccgtgtcccagcctaaaagaggatgaccctggtttgcgtcaacagagccaagcagaccatgtactcttgccatgcgtaattcatgttcgaatgtatgcccggctaatgtggcatgattggcttcaagatttaatttaaaatgattgtctaagccatattgcttcaaaaaggcaatggttgttgctgcatctgtatcgtattgatgggtggtcggctcttttggttttggctcaatcaaaaactgccctgtgtacccgatttccttcgcataatccactgccatatgcataaatctagccaaattatcaagctcaaattttaaatcggtatttaacaatgtttcatatccttcacggccgccccaaaatacatagttctcagcgccaagctcttttgctgtttctaacccttttttcacttgtgctgcagcatacgcaaacacatctgcattgcaagaagtcgcggcaccatggacgaaacggggattcgtaaacatgtttgcggtattccataatagcttaacgccgctatttctcatgtaatctttaatcatgcccacgatcatatctaaattttggtttgtctcttttagcgtactgccttctggtgcaatatcccggtcatgaaaagcaaagaatggtgcatctagtatttcaaacatctcaaatgctgcttctactctcatcttcgctagatccatgcctttatagtgatcccatggtctttgcatcgtagctgatccaaaaacgtccgtaccatcagcagtaaatgtatgccaataggcaatagaaaatcgcaaatgctctttcatcgtttttccgccgattacttcttgaggattataatatttaaatgctaaaggattagtcgaatctttcccttcgtaaaccactttgtttgcgcttccaaaatagttaattgaactggaatgagattgagccatgtgatttcccccttaaaaataaattcattcaaatacaaattcattttatttcatcttgtaagttacctattagtttgttgtttaaacaaactaacttattttcatcttatataacctcatcagtattttcaatattttttttagttttttatgaacacattagatataataaagggaagattcgctatgtactatgttcatacttaatttaaagattaaacaaatggagtggatgaagtggatatcgctgatcaaacctttgtcaaaaaagtaaatcaaaagttattattaaaagaaatccttaaaaattcacctatttcaagagcaaaattatctgaaatgactggattaaataaatcaactgtttcatcacaggtaaacacgttaatgaaagaaaatctggtatttgaaataggtcaaggacaatcaagtggcggaagaagacctgtcatgcttgtttttaataaaaaggcaggatactccgtaggaatagatgttggtgtggattatatcaatggcattttaacagaccttgaaggaacgatcgttcttgatcaatactgccatttggaatccaattctccagaaataacgaaagacattttgattgatatgattcatcactttattacgcatatgccccaatctccgtacgggcttattggtataggtatttgcgtgcctggactcattgataaagatcaaaaaattgttttcactccgaactccaactggagagatattgacttaaaatcttcgatacaagagaagtacaatgtgcctgtttttattgaaaatgaggcaaatgctggcgcatatggagagaaagtatttggagctgcaaaaaatcacgataacattatttacgtaagtatcagcacagggatagggatcggtgttattatcaacaatcatttatatagaggagtaagcggcttctctggagaaatgggacatatgacaatagactttaatggtcctaaatgcagttgcggaaaccgaggctgctgggaattgtatgcttcagagaaggctttattaacatctcttcagactaaagcgaaaaaactgtcctatcaagatatcatagacctcgcccatctgaatgatatcggaaccttaaacgcattacagaattttggattctatttaggaataggccttaccaatattttgaatactttcaacccacaggccgtaattttaagaaatagcataattgaatcgcatcctatggttttaaattcaatgagaagtgaagtgtcgtcaagggtttattcccaattaggcaatagctatgaattatttccatcttccttaggacagaatgcaccggcattaggaatgtcctccattgtgattgatcattttctggacatgattacaatgtaattttttatggaatgtacagctcatctttaaagatgagcttttttattctaggggtatttctgaagcaatagtgacataggcaccttctcatatgaaaaaagagttctaaaatagaaatctcctttttcatgtgcaaattatttttctttataacgaaaatatctaaagtcggccggaatatgattaccactggtatcttggcattgcatccctacaaaggcccctgtgaagaatcctcccccacggatgtaatcatctgataattttttcgattccagtgctatgtcaattttgtgccaatcttctttgttaaaagaataaaaataataatatttgtctttttcaatatttactcttaaatatacatactttacttcacgaggaataacaattttattatttaatggctgtgaaaaagaaaagttgtcacatattgttaattcaagaatgcggccaagttcttcatcatgcgtgacttgaagagccgtccagttctctgtattgtagtaattcaccaatccagcggcttgttgaaaattttccggataaaactcaacagcagtttcggcttcaaaatggagactttgccagcgtctggctacaaatgcctgagtaaatgtcgaggtcaatgattcatgaccgaataatcgtaaatgatttggcgcttgagtcaatgaacctaattcattcgtgaatggaatccttaaagtttgaaaatttatatttaatgttgaatcctcaaattcatcaacttccgggtacgttgcttcaaatattgtttcgggtatagaaggtgcatctacctccaagcttccttcttttccacctactacatagggccattcatctttccagtaaagtttttgaatagctgtttctctgcccaaaggacagtatcctctctgctgaaaaattgaatcatcgtcaggatgaataggacgtcccgttaaatgagctaaataccactcatctgtatgtgtttgaacaatggatgcatgaccacatttttgcaatggatttcctgggtcatgccatgacgttaagattggattatcgggatgaacttcatatggcccctcaatatttgcagaacgggcaattgtagcagcatgttcgtaccgtgttcctccttctgcagttaataaataataatagttcccgatatgataaagatgcggagcttctgtcagttttctatccgttccttcaaatataacttttggtttaccgattaatttttgctctttatcagaatattcctgtataacaattcctccaaatgagtgccgatcaatacggtgatcccataacatatttaataaatacttttttccatccttatcatggaacaaagaagcatcaaatcccgagctatttaatgtaatcggctcactccaatcaccattaatcgtttcacaagtaactaaataattgtgacaatctttccatgcgccatctactaccttaacatccgtatagataagccaaaacttcccatcactatagcttaaacatggtgcccaaaccccacctgaatttggatttcctttcatgtctaattgtgaaactctctgtaatggatgtgcaactaagtgccaatttactaaatcttttgagtggtgtatctggactcccggaaaccactcaaatgtagatacagcgatataataatcctctcctgccctacaaatacttggatcgggattgaatcctttaagtacgggattggtaatcttcatttgggactcctcctcagttaattttcttttttaagctttgaaatcatcaatatgatccaaataaactttgtctctattctctaattctcgaaccatgtttttatattttttctcatctaagttatagaaattaatatcaattaaagctagaacaagcaagaacacgggaataatcgttgttgtaattaaaatccccattaatgccgccggggtttgtgcctgatttgctacatatccaaacttatcaagaaccagacccggaacaactcctcctaaggccataccaaacttaaagaaaaatccgatgatagcgtaaatgagcccacccattcttttcccagtcctgtactctccatattcaattgtttcaggaataagcgcccacatatatcccccggcagtgagacttccagcagcagcgattaatcgacagacaagtatgaggtatacattacttggcggagcaaacagtaaagctaagaggccgataatattcagtaataatgcatagtttagtaatttcttcttccccaaaaattgatgaagccttggaataaacggtaaaatgaccaaagcgggcaaacttcctatcaaaccgtaccacttcaccaaatcctctctttctaagttatatgttacgtaataaatgccaaccgaattactgatggaattcactccaaaaataataataaagaaaatacttaatacaacaagtggacgattaacacgaaactgctcaaatatatccgtaaatttaattttttcttcggatttttgaagagtgacccgctcttttgtgcttttaaaacaaaagattaaaaggcacccgcctatcattcccaaaatacccatggttagttgccagccaagagactcgttgccggaagtatcgcttaaataagcagccagtaagggaacaaaaaatgcaacgacaagtcccccaagattcgcaaataacatgcgaacagaagttatactaacaacttcttgattatttctagtcattgcagaagttaacgcgccatatggaacgtttatcgttgtgtatgtaagcgacaagccaacataggttatataggcatatactaatttccccatatccgaaaagtctggtgttgtaaaacagagtattgccagtatgacaaatggaaaagctccgaataaaagatacggtctaaagcgtccaaatctgctgttcgttctgtcaactattgttccgataaaaggatcagcgagagcgtcgattattctaaccactaaaaacatagtaccggctgctgctgccgataaaccaaaaacatctgtatagaagaacaaaagatacgtagacactgttgcataaattaaattacaagcaaaatctccagacgcatatccaactttttcaaccatgctaatcttctttacattttcactgagcatgatttctccccttttcgatcctttaatatggaacagtgtgaaacggtataacaatttctccaatttacggtcagtaaacttttataaaagcgctttcaaaacagtgcaaaaaaatatggtgatcagcaagcaaaaaattcatcttttttcgtcataccttatatacctggaaaaggataaaagcctcattctttcgtttcttatattgtttagctccattaaatcgatcctcttatcccccttccatccatattcagtaagaccttatctttgtggacaatgaaagttcatcttgttagtttgttgaccgaacaaactaacttgttttaatattataaaatcctttcaactttttcaacatctttttcagaaagtttaagcattgtctcgaataatatttaagaatgcacgtatcaattaatgacacccagtctttttgttacagtttgttacttactcataatcattccaaagactaaggaaacaggattcttatgttcaatcatatggcaacaatgtgaactatgcgaaacaaggaagtggttagcagcggtaagctgcaattagagtttgataaagttgatcacagataattatagaagactgttagccgtgcgttttggttaatgacaagtctggtcttgaaacataattgaaagaaggattggccagagtggcttatgttatgagccaaacactatttatctaaatattaaattaagaatccaagcaaattccatgttgtcttttgatgcgactttgttattgaaattggaacaaaagaggaatacagaaatcagttctgtattagtttattcaatatattgattttcctttggtctttatagttcttctttgttcttctatagccatctaataaagactttttataaaccttgaggtaatcatcaatcgttagcaaatgatatttcgctccaccatcctcaaatacctctaagttattatagtctacatctgcaaatggttttaaatcctcgatgtaagcaatgcctattttagtattagttttcttaaattcatgctcatgtaaatcaaccattttgtatccatgcagttccatcactttttttagtttttcccacttttcctctaaaaaaattaaaggaataaggagatcaatatcttctggagaaaagtctaacccagttaccttttcaagacctaaagatccatataataatggaattatgtctaactctttattaaacgttttagctatattgataaattcattatacaatttcatttttcatccccattatttggtgattaattattaagattcaactggctcttgaattttcataagtccttcaatactttcatgtggtatatatctcaaagggtaattttttcaaacatcctgaaagtcatctgtacaatatctaaaaagccttgaaaactgaattaaagaaaaacatcaaaatgataatggctagcacaacaacaatttcaaaagtatgtgaactgccatcttctttttctcgttctttcttctccctcatttgttccctatattttctttgtatttcattctttttcctatccaccttactcgacccctttcaacataaagtaaaggcaagcaattctgaaatttttttattccttcttttgacaagttcgaaaataccaatgtataagcgtaatgcctaatggattaaactccaaataacaaagcccctccgataaaccaaaaaaaggaaatggaaacataattgcatttaagacaatcccatataaagcacaccgtttatttgtctttattgaaacgaacgctaaaatgattcctataggagaaagtaataatggaaaaaacaccggcattccttgccatggaattgacataactcccgtaaaaaaattaataattaggatagctgagataattggaatcgtgattgaaaaaacagctgcagttttttaacattcatattgaaagcaagtctccgttctctttaaaatcgtagttttatttaatcttgagaaagtttgtcaaaatctctttctttcatttcaggcagagttatatcaattcctaacatttttattaattcttgtacatagctttttattgcaagcatattaaatgggaaatcgaaatcaaattcctctttagcgcttagaatatccattgcatacgaacagttatgcttcatacccaaaagaatacgattgatcagataactcaaagtgagtaactaaataaacactaataaggtttccaccttgagaatcaaaatccactaatcttttatcaactactaataaaaatgcagatctctcatcatcacataataccaactgaaaaaattctaagtttctcagtttcaataaccgtttacatcttgtatgtaaggccctcataatctaattctgcctttcctgatataaatcgttttataaaagagtattacatgcacttatactcttctacccagtcgtgatatttttcataaagtggacgtattcgtttgaaatcaagagctatgacttcacatccacgatcatcatagataaagaaaataatgtcttttgtaatgttcacaaagaaaacatcagggtaatcaatagagtaacctccgaatttcggttttaatggaaaatcctcgttactggctgctttaagtaattcagttacacgtaagtctcgaggtttgcataacaaggaaaattgttgcatctcgtattcttcagctttattgatttcgaaagggtagggatatgtcttcaccagaatttgattcaaatgatttttacactttagaaacggttgatagacctttaattttcttatacatttctctttcttgtgcttatacatattcgttacgaggaatatgtcttcgttttgttcaaataattcattaaaaaggattgttatttgctcatatacaacttggaacctcttaagattcaattcttcattttctttgagttgatagatatttttcccaagacaaaaatggattcctatgccccattgattatagatgctaggaatgaattcgaggttttgaaacctttcctccatatactccattatcttcatttagacattctcactttagaaatatgatctttttggaatatcaacaactcatgcagttcgatgttttgatagggacagactttatcaaacagctctctcggataccgctccatttcgtcattatatagctttctgacagttggatactcatgatcaatatctctggaaagtttccggatactgatctttctttggtctataatcgtttttaactttgatttaatcatattctcaccttttagttatttttgatcacttaaaatgatcattaagtttataatggatccttgacctcgctgaatttaataatcccgctcttcatgttcaaatccataagtaccttttatccacacatcgccgcagtctggactttttgttatttccaactgatcaccttctactcggtctgctgcactgtagtccaaataacttcctgtgaattctttctcgctccttgataatatccatcagttagagctattctgctaagtttcatatttagagtacagtctttattattgtgtattgtgaatttaaccaagtgaggtcaaaattccggtcgatcaaaacaaagtctacatttgtttaatccaccgttagctttgcttcagcattcggaagagtaaaacttgagactaagcctaagcaaaccaaagttaaacgattaacccttttcatccctctctcccttacccatttatggcataattcggtaaataaaaggggctttttgaccgtgcataaggaaaaggattgtgatgatttaagctacgctgctaccctcccaatgttttgcagaaaaaccgagtcccagatccaaaatattacggcaaatgagacgctaaacaagtaaatttcatatcccatcagaaagtttaaggtgttttttggatcagtaatgaaagcgaagaataaccatactaagaaggaaaagaatatgtatatgagtaaatatttcgcgttaaacctttttggattgcgatttaagaaatattgaacaggtgcagcaaagattaaataaaagataaagagaagaacacttattaggaagtatggtatgtagccgtcataaccaatgccaaaaacataaacaacagcagctgataacgcggacaagacatgaacaaatatgatccttaaaacttgcatgtttataacctctttcttaatgaatgcttcttaaacattgtctagatcctccttaaaactactgttctacttagaaattaaacatcttggtcgcatttctcattcttccgccattgaatagtatttcggcgagttattgcaacagttattaatagtagagtaccgacaataagcaacataaaaaagatcacaaacagcgaacctgttcccggaacaatttcttcataggtaataaagcgctcctccccctgcaggacgaagaaccgagaattttcaagaaaggctagatgaaaagcgatagacgtccataagcttcctgttacaatacggaggagttgaaggatgaatccaaaacccaacaataaaacaatgtaatctaatgtgatagcagatgattcaactccagctatatattgtaaaccacttacaattattggtgcaagcacaaacaggattggctgtaggagtaaggccataaaacagttccaacgcttatttagagcatagtacaccgtcccccgaaaagttaattcctctggaaaagcttcataaaagaaagcgataatcatatttaagagcaatactgtcactaaatggacagagaagtgaaattgtgtaattttgatccagcctaataaatgggcgatagcgaaaccagacccggataatacaatcacatatattgctcctattatggcattcggaatggcttgccgccacccagacagtcctatagaataaaagggtctactagacatccgtttaagaagaatgtagagcaacgggacagttattaatgtgactaaacctgcttggatgccttgcttcaaaagcttggaagctcctgcttggctagccattgaaccgactaaagtagcaaaaaacaaagcaaatacgaatgttccccaactgagcaagacagttcctaaccatttatgatgattgtcttgttttccgcttttggtgagatgaatttgcatttggatacccctctcacatcattcatattaagcactataagccctactatcactatacgttctatagctgttatggtttcaatttcctgcattccccctcttacaattccactcttcctctaaaatagcgtaataatattcatcccaccattcattgccttttggaatacattttttaaaaaagccttctcttctcattccaatcttctccataactcggtatgagggaatattctcaggttgacacgtagctataatcctatgtaagttgatttctttaaatccatattccaagatagcttgggctgcctcagaagcataccctttattttgataattgggattaaacacccacccaatttcatatgtatgttcaccaaaatacttataaaaaacaatatggcctataagacagtcttcatctcttagtatgacagggaatttttcagcgttatcacctttgtttttatttacaaatgcctttgcatcttcttcagtaaaaaccccttcaggtatatacttcattacattactatcagatgtatactcatatacagcctgccaatctgtgaatgcaaattcacgtatcaataacctttttgttgtgatatgcattaaagtaactcccctctaatatacttagtctttatttcaatatgaagacaacaataacctctttaaaactattcttattcaacaatattgcctcttgctagaacaactcaaggattactgactgtgaacaagcaatggaatatgattctccaaaataatccccctacctttccctgagggataattatgaaggaacaatacaacaaaaaaatggaagtccaagtagctctgcaaaaagaagagttgtattcattggctaatgactggcttggctttattaaaacaaacgataaagatattgaatcaattgattacgattacactgatgattatgaggttaacccaatgagcggcattgaaatcaatggttatctcaatagaaaaaagtaacacggggaaaagacgaagtaagatcatttactgcggatgcaactcgtaagccagattgcgaagataaaataaggattaaacaaacatccccttacaataagtaagaggatgtttgttatcaacaagattgtttaatttaattggtattccttattaagctttttaagaagtgaaatttcaacttcgtattggcttccataaactctgctaattttttgcacttcttcctttgagctgaagaaaataactttaaaatcatcatttacgtattgaactacaaaaaaacatcaaaatcatcaaatgtatttttatttatcgaaataaaaccacttgattgagctgttgtttttacactaatccgcctgccatcattcacaacatcaaatccatgctgattagtttgacgtgccagagtgccgttggtttggattgcacaaatgaattcaccgattctgccaattaaatgcctcaattctgtgggcttacagttcaatacattcatttcatatctcaggatttggttatattcattataaaggtttacaagttgttctttactaatgatttcagcttgatcatgtatttggttattagtaataggtacttctcggagtgatttaacaccgtttacccattcgcctacgataacttccttatcttccccttttgattttctgaaaataagtcctgtataaagagagttttcacctaagtatttgtaagaacttctattcacatattcaaagaggtgcttattaaaagaaatccccttattataccggttataacaataatctgataaaataatgctatccggattagttccgtatttttcttgaagggttttctttacttcttgaggtgaaaccaactcattgatcttattttttaaagcatctttaatttgctcgtaaattgtcattatacttccctcaaatttgcagtttctttggttgttaaaataagtcataattttttcttttgccgaagtgttattctgaaaccagtttataatactcttggagattcggatttacttcccaatatttcgttccattagaagacactagcatatcaaaccatatctcaaaattagaatttaagttaatcgcatcttcaatatcgtcaattgagtctagatataacatataacctaatcctttttttgatttgtttgtgtctatgacataccttccatcaaaatgatatcctattaataagtatccctctgggaaatcttgaacctcattatattcaacgattccctctaagctaagtatttcaatgccatcaaacatttccatcccattgtgttgtaacaaaaactctttaaagtcattaggaaaagtaacacctaatttcttttctaagccgctaatttcttgaggagttgctggatttttgaaatgaaaagtagcatcttccaagacataacccccatgatggaacacaggaaatgtaccatatttagtaactgctttcttaataccatctaatgtcatgtgaactaactttccttcttccataaatgctcctcctccttaaatcatctcactaaattttaccacacagaacattaagataaatttaaaagggacataaactgtttattaagaaacaattttactcataattaaagcaggattagtggtgaacaaaatgtaagtgttatatgctgttttaattactaccctatctgttgagccataaggaaacccaatccttactgcctcttttctcctctcccccatagtttggatcaagaaatacatcattgatttctttgattggaatttcaattttggatagctgccaattgataattaagttttcatttgatttttcaacgttgattccaagcataaaaacattccccttttgactatgaattcagtgaaacaaacacgctttaaaatttaataaatccaaaaagtaatacttacgggaaatatgactataagcaaaagagccctttcaggcccttatttttcttttacccttggtatgaatttgttacaaactcttttgctttattagcaacagtttcccaagtggcggcagcatgatcaagatccgcagaaagcttattgatatcctcattctcaaacccttgggcgagtgaataaaattgatttgctatagaatgccagatgccttcgatttgtcctataaactccttagacttttctgcttgagctattaaattaaccaagtctatattgatactgtgaagcatccccaaaacttttacttctaattctggaatctgtatataatcttcatcgcttggactttgatttttctgtttcttgagtaattgacttaaagctttccacacagtattgtcctcctatgatagcttctttagacgtgcctctatgaaaatggtcatttggtgatcggcttcacgaaatgtctcagcaaatgtttcaattccggtatcctagaaacatggcgttcgataatcatgcccacggaagccccagctgtgtggaccagttgcaagcataagcattctgcgattcattaccgaccttgtcaaagaaatactaaataaaaaaagaacctttattttaccattggcttacttttggcttacttttgaaaatttataaattattattatattgaacagtgttggtatgatgtatacaagaccagttccaagtagacctattactgaactagtaattaataatatgctgaagactggtttattatttgtatggattgaagcaagcatggttataatccccgccaaagcacctaaaaaccataagttccccaaagtgtaagagtcatctaaaaccgcaaacagttgagccagtacagaaaaaaccgctcctaatcccccggagaagatagtcaattttttcatagaaatctcctttttgaaaattgatttagatttcaacgtaattatggatttatttggttatgatgtcaatgataaacatccaccttactcatcttattattgctggtagaagtattgaacaatggaattatcatagagtttgtcgaattatttatgcgtattacttccttaagcgtggaattatttccctgattgaaaatttagtacaaagaaaaagacttatccatttcgataagtcttgaaattcattctttactggcaacacttttttaaattcatttgtgacagacggtgtactttgctgtaaattgtgatctttgtttaaaaattatctggcacctgtaagagatgtctccccaattattattgattttttgtggatgttttgtggggtcgcacatgatttatattataaatcaaaaaatcccctgacaccaatagtgccaagggattgagagattaatattgagacatatattgttcgcgctcccaagggtgaacttgtgtgcggaacatatcccattcgatttcttttgcttcgatgaagtgttcgaataggtgctcgcccagcgctttgaccatgacttcgtttgatttgaattcttctagtgcttccgcaagtgttgctggaaggtcaacgattccgttttccatgcgctcttctttgctcatcacatagatgttgcggtcgattggagccggcgcttccagtttgtttttgattccgtctaatcctgcagcaagcaatacgctaagtgcaaggtacgggtttgcagctgggtctacgctgcgtacttcaacacgtgtgctgatgccgcgggaagccgggatacggataagcgggcttctgttttgcgcgctccatgctacatagcaaggtgcttcatagccaggaacaagacgtttgtaagagtttactgtcgggtttgttactgctgtaaagcttgttgcgtgcttcacgatacctgcaataaagtgtttcgctgtttcacttaactgaagatctgcgttttcgtcaaagaatgcgttaacaccatttttgaagagtgatagattgcagtgcatacctgaaccgttcacaccgaacaatggttttggcataaatgtcgcatgcaggccgtgtttgcgggcaattgttttgacaactagtttaaatgtttggatgtcatcacaagagcggactgctccagcatatttaaagtcgatttcatgctgaccaggtgctacttcgtggtgagacgcttcgatttcaaagcccatctcttcaagctcaagtacgatatcgcggcggcagttttctcctaaatcagttggagctaagtcgaaatatccgcctttgtcgtttagttcaagcgttggctcgcctttttcgtccaatttgaataagaagaattcaggctcaggtccaaggttaaaatcactgaagccgaggtcttccatttctttcagaatccgttttaagttgtttcgcgggtcaccttcaaaaggtgtgccatccggattgtaaatatcacagatgaaacgtgctactttacctttttcagctgtccatgggaagataacaaatgtatttagatctggatacaggtacatgtctgactcctcgatacgaacgaatccctcaatagaagaaccgtcaaacatgactttattatcaagcgcttttccaagctggcttacaggaatctcaacattcttgattgttccaagaatgtcagtaaattgaaggcggatatacttcacgttttcttcttttactaatttttcgatatcttctctagtgtactttgccatttggtaaaattcctcctcttaaaaggtaaatgtatatagcaaaacagttgctaacggattaatgaaagaagcgggacatgtcgccttgacggaatgtattccctctttgaaaacggccggcttgcatgagctcgtttttcaggagctgtctcagttcgtcatcggacagatcatgtttcattggttttttcgtcttctcgttttgtttttgttctggctcggcttcggctttcgccagaatctgtttaattcctgccatgtttacaccttgttctatcaggtgcttgatttctaacagtttatctacatcatgaaatgaaaataatcgtctattcccttcacttctggctggaaatatcagtccattttcctcataatatcgaatttgtcttgctgataactcagttaactgcatgacaattcctattggaaataaaggcattgagcggcgaatattatcactcatctcaatttcctccttttcttaacttagtttcattataggtgatgttatattatgtgtcaatacgatgtaaggattcttaacatcaaatccagagaaatttttaaaaaatttaaattaattgcttttccatcaatgaatccactgcactgcatatggcattcttcacatgcgaataggttaatcctccctgaacatacgctacatacggcgggcggatagggccatcagctgataattcgatgcttgctccttgaataaacgtgcctgctgccataatgacatcatcctcgtatcccggcatgtaggctggatacggcgtcacatgagcattgattggcgatgcatattgaatagcctggcaaaaagcaatcatcttttctctgtcagaaaactcaacggattgtatcaaatccgttcttttcgcatcccatttcgggtttgaagtgaagcccagtttttcaaggaatctcgctgtaaacaccgctccctttaaactttgagacacaacgtgaggcgccaaaaagaagccttggtacatttcttggagcgagtaaagagatgcccccgcttctctgccgataccgggtgacgtcatacggtatgagcaagcttcaatccatttcgcttttccgacgaggtagccgcctgttttcgcaaggccgccgccgggatttttaatgagagatcccgccatcagatcggctccgacatggcaaggctcaagctcttccacaaattctccgtaacagttgtccacaaagacgatcaggttttcattgatttcttttacaaaacggatcatttcttttatttcactaattaagaaagaagggcgattcgcatatccttttgagcgctgaatgcctattacttttgtcttcggattgatcgcagcggcgactgcatcatagtctatctttccgtctttcgtcagttcaaccgcattatagccgatttgaaaatcctttaacgatccagcgttttctccacccctgacgcccacaatttcctctagcgtatcatacggcttgcccgtgatataaaggagctcgtcccccggtctgaggacaccgaacaaagcaattgaaatggcatgtgtgcctgaaatgatttgcggccttacaagccccgcttctccgccaaacacatccgcatatatgctttcaagcgtgtctcttccgatatcatcatagccgtatccagtagacggcgtgaaatgagtgtcgcttactttgtgttttctatagctttgaagcactctccactcatttcgctcgctgatttcttctatttgtttatgaatgccggcaatgtccgcttccacttccattgccgttttcttcaataattctccgtgtgttaatgtgtcaaacatgtctttatatttccttcctacatatacttctttaattcaccgatgatactttgctcttcttggacatagccggatatgtcatactgttcattttcttcattaaaatagaagcggtctaccatcgtttccgatttgattctggaaaggagcttcccttcacttgccggcacatgtgcttcaaaagacgttaacagttcttggcgcaaatagcgctgaatcgcttctttaaaggctgcagcgtcgtcctcaaatttcgcactgaccataatgtgatcccttccggcggacggtataaaatcaggcagtttttgatcacgtttattgtaagccgtcagcatcgggatatcatctgcttcaagctcctcgagaagccgaagcactgttttttcatgtcccgcataatcctcatttgaagaatcaattaaatgcaggatcaaatccgcttcttttacttcctcaagcgttgagcggaatgcagcaatcaatgtcgtcggaagatcctgaataaatcctactgtatctgaaagaagaacactgtagccgcttggcaggaccatttttctggtcatcgggtccagcgtggcaaacaggagatcttcttcatagctgtcagcactcgtcaggcggttgaaccatgttgatttccctgcgtttgtatagccgacaagcgcaatttgaagcacaccgtttttctttcttctttcacggtatcggcttctatggcgaatgacagtggaaagctgtgtgttgatttcatgaatgcgatttctgatatggcggcggtcggtttccagtttcgtttccccgggacctcttgccccaattcctccgccttgccgggagagattgatcccttgtcccgtcagacgcggcagtgcatattgcagctgagccagctcaatttgaagtttgccttctctcgttctcgcccgctttgcaaaaatatctaatatcaattgcgtgcggtcaatcatcttcacttcaattgctgttgccaatgacttcagctgacttggcgacagttcatcattaaagatgaggagatcagcttcaagctcttccaccagtgccttcagctcttctaccttcccttttcctatatatgtagcggcgtcagccctgttccgtttttgtgtgacgctggtcagtacttttccgtctgctgttttcgtcagagatgctagctcttccatagaattttcaaaatgctcatccgtgatatgcggcagctgacatccgactaaaatggctttctcctgaatcgtttcttgttcgttcaaatggatgttcctttcttttgcatattgggcagtagtattatcataccaaaccctgcatgtgtataccacaaatcgattgctttgaaaagcggaaatacgagcaaaaaacagacctctcaaaaactgagaggtctatgcagatccagatgcttcttctttaatggaaagatcttggcttttgatggtcatcaagtcgctttttaagtattggtctcccattaaaagcctcatggcttgtgctctgatcgatttttcgatcacatttctgacaaaacgtccattgctgaatttaatggggcttgtcgtgcttttcactgtcattaagtaatctttcaatttccattccgcttcttgactgagctggtattccctttcatcgatcattcgtttcgcaatctccatgagctgggtcacagagtaatccggaaaatcaatggagatgggaaatcttgattggagaccgggatttaacgagagaaaatgatccatttcccgtgaatatccggcgagtatcaaaataaactcatgctgtttgtcttccatatgctttacaagtgtgtcgatcgcttctttcccaaagtccttttcgccgcctcttgccagcgagtaggcttcgtctataaacaaaatgccacctaatgactttttgattaaatctctcgtcttttgggcggtgtgtccgatatactccccgaccaggtcagcccgctccgcttctattaagtggccttttgacaggacattcatttcaaagaacagcttgccgatgagccgtgcaaccgtcgtttttcccgttcccggatttcctttaaacatcatgtgcagcgcttgctttccaaccttcaagccttgctccgcgcgtttttggtttacaaaaatccaggcgtatatttccttgatgttgcgtttcatttcctccatcccaactaatgcactcatctctttttcgatttccttcaaaatgccgtgctttgcttcgtttttttgcaatgcagcctgatattccgcctctgcctcagcattcgtcagcacctgcttttgcccgttcagaataatgttgatctgtccgttgtttttataagtcacagcgcgctccaacatcttcacctctctgttctctctatatgatattcaagcggatgccgattgtgacaaacgcctatcatgtgtcgaaacaattgcttttttcgggaacaataaggaatcctgcgctttcccgagaaatactttatttcttattgtattcacggacatggggtggacaaaccatgagattttgtttttaatcattttgtcagagtattatggtgaacttctttttcattattttctccattcgccaatccttttttcatccaacgggctgttttttgtacgaagcgtattatccgccctaagatacctgaagtgtttttctttttttcgatttataaagtggtgtctttaatgaaaggagcttttctcatcaatttacgtttcaaatgcttgatttaatatgaacgcaaagcttaaaaccagcaggaatcagtgcaggttaaccgaactcaaagtacatacaaacatatggtatatgtacatatttcatttcagaccgtatctgttgtcgcttcatgttgaattgtgcgctttcccgagaaataatttctggatgtgaaaggattatttcctcatttttcagttgaatgataatcgtacaagcagaagccgtgttttttcatatcctgtaatgaggtgatgaaaaatggttaaaatttttattgatcctggccatggcgggtctgatccaggcgcaacaggtaatggccttcaggaaaaaacgttaaccctgcaaatcgctttagccttacgtacgatattaactaatgaatatgaaggcgtttctctgctgctgagccggacaagcgaccaatatgtcagcttaaacgaccggacaaatgccgcaaataactggggagcagatttctttttgtccattcacgttaattccgggggaggcacaggttttgaaagctatatttatccagatgtaggagccccgacgacgacttatcaatcgacaattcactctgaagtgatacaagctgtcgactttgccgatcgcggcaaaaaaacagcgaacttccacgtcctaagggagtcggcaatgcctgccctcttgaccgagaacggcttcattgataccgtttccgatgcaaataagctgaaaacgagcagttttattcaaagcttagcgagaggacatgcaaacgggctggagcaagcctttaaccttaaaaagacttccagcttagggttatataaggttcaaatcggcgcatttaaagtcaaagcgaatgccgactcgctcgcaagtaaagccgaagccaaaggttttgactcgattgtccttttaaaggacggattatacaaagtgcagattggcgcattttcatccaaagacaatgcagacaccctggctgtcagagcgaaaaatgccggctttgacgctattgtgatcctagaatcatagccgagactgggacgagcgtctcataaaaaaacccggctcctcatcgcgagaaaccgggtttttttattcaagaatatcaacaacaaactgtgaccatgtttccagacggttgtagatgtcatcctgttttaattcagaaactttcatccatttacccgcaatttgttctttctccttcacttccacttgtgcgccaggctttaattgaagcgcagaaagaataccgatatgcactttgccaacactattttcatcatcattgatcaatcccagtgtgacaatcgcctgtttatcttcttcatttatttgcagttcttcctcaagctcacggtctgtgttcagctttaagacttcagcaaatgaagctgccccttcgatggcgttcatatgaccgccaaagccgagagaaagcttgttgtgcagtcgtgattcaccgccgccagccagccgctcgtaaagaaaaacttcatcttcacgcttaatgacgacataaggtatcggctgcttgaaacgcggatcttcttctgcgtcccctcttctcatttcacgataggccgcttcaatctgagccatgatttcggctactctgctatcttcactgtacacgccctggaaggttaagctttctttcttaaacacatcatcgcgcggggcaactaaaatcatttcgtccatttttcccatgggtactgcgtcctcctcatttgaaccttcaagccgaaaagagcagatattatatctgctctttttcatcttcaaaataaaagtcatcatctttgagcggctcaactgtcgcttttttataaccattccccttcatagagaagaagtcatgcgattttgtttttgtgtttaatccgtttaatacgatcggattaatatcttcctcttcgaagtatggatcaaatccaagattcatcagcgctttattcgcattatagcggatgaatttctttacatcgtgtgagagcccgacttgatcgtacaagtcctctgtatactcaagctcattttcatataactgattcaggaggtcgatcgcaaattcacgaagctctgcttttttctcttctgtctgtttattataaatttcctgagcaaggagaccgacatacacgccgtgaatcgcttcgtcacgaaggatcaggttaatgatctcaccgctttgcatcagttttccttgtccgtagaaatataacggataatagaaaccgctgtagaaaaggaagctttccagatagacggaagcaaccatcgctttgaacagtgaaatttcatcatctttttgaatggctttgtaaagcccgacaatcatttgcgcttttttctgcaaatatttattttgtttaacccattcaaatacttcattgatcgtttcagtcggtgcaagggtcatgaaaatattagagtacgacttcgcatggacagcgttctccatcatcgccataaagttcagcaccgctttccgctggtggccgtctacgtgttcagccacgatcggcatccccgtattcccctgctctgtatcaagaagcgtaagtccggccagtaccttcatataagtgtcctgctcattttttccgaggtacttccatgtgaggagatcgccgtttaaagcaatctcttccggaagccagaactgtttcacgttttggttatagaacatttgggtaaaatcgtcttcatgctttgaccagtttgctgcgtcataaatttttgtcactataaactctcctttaatcaaacaacacaagaaaggcagctgtcttgcccagtatctttcgttcttgcatagtaaatggttttaatacctctatgatgtgcatacagatcgattcggtttaaatcacgggtcgtcattgtgtcttttaagaacaatgtaaagctgattccctgatcaatgtgctgctggatagtggcgatcatatccacaaccttgaacatgtccatatcgtaggcttctttatagaagaaccagttattagatgcaagcccaggcattgggtagtacgtttttgagttgccgtatgttcgttcttcaatgcgttccataatcggcataacagacgccgtacttgattgaacgtatgagatagagcctgtcggcgcaatgcataatctgtagctgtgatacataccgtgttcagccacaaatgcttttagctttttccagtcctctgtcgtcgggatatgcataccttcaaacagattagctattttttcatatttcggtgagaaatcagtagaaacgtatttgtcaaagtattcacctgtcgcataggttgagccttcatattgatcaaacgtttcacccttctcttttgcgatttccgcagaacgctggatggagtagaagttcaccatcataaagaacgtgtttgcaaagtcacgcgcttccggactttcatacgcaatgccgttttgcgcaaggtagccgtgaaggttcatagcaccgaggccgattgatttcatcgctttgtttgcccgtcttacagcaggcgcattacggatgtcagttgtttcagacacgtgtgttaaagagtctgtcgcaagcttgactgtcttttcgattgatttatgctccatgacatttagaatgttaagcgaacccaggttgcaggaaatatccagaccgatttcatcttcttcatcatagtctgtgtatgaagaaacttgagatgcctgcagcacttcagagcaaaggttagaaaatttgaccttggaaatatggttattcgcatgcactttattgacgttatcttggaacatgatgtatggatagcctgattcagaacgaagcatcgccaatttttcaagcagtttccgcgggttgattttttcctttttcacccgaggattgtcgacaaacttgtcgtacatttcgttcatgtccatctcatccatgtgctggccgtactctttataaatcgtgtgcgggtagaatacataagccgctttgtcctcgcgtgcaagctcaacgaacttatccggaatgacaacaccgatcgaaagcgttttgacacgcacatcttcatccgcagaaatctttttcgtatcaagaaaatcattgatatcgcggtggaaaatgtttaaatacgccgcgccggacccttgtctttgtcccatttggtcagcgtaacggaacgcgttatcaagaagcttcatgacgcctacaacgccttttgtcgcattctcaacatctttaatggcttcacctttcgcgcgaagcttggacaggttaagagaaaccccgccgccaagcttagaaagctgcatggagatatcgatcgctcttgaaatgtcatttaaggaatcattgacttccagcaagaagcagctcacaagttcaccgcggcgttttctgccggcgttcagaaatgtcggtgtgctcggctgatattcttgattgatcatcaggtttacatattcttttgctttctcagtgtcgccgttagcgaagaacagcgcaacaattgagatccggtcctcataacgctcgaggatttttttcttgtcattcgttttcaaagcatagtcattatagaatttaaacgcactcatgaaggaaggaaaacgaaacttcttagcgtaagctgtcttaaacacttctttaatgtcttcaaaagaataaaggcttaagaattcctcttcgtagtattggttttcaaccaaataatccagcttctcttttaaatcgtgaaagaagactgtgttttgattgatataatctacaaaatagctatgtacagcctctttatccttatcaaactggaattttccatctttttggatcatgatttcgttatttaactggatccattttggcacttgattttgtgacaactctttctacctcctgagtaaacaattcaacgtctttagatgtgccgctgagttcaaatttgtgcaagatcggcacctgatattgtcttgaaatggtatcggcgctttttgcaaagttatcgccccatactttgttgccgctcgcagcgactcctaataagagatgggcgtatttttcgagaaatgattgtgttgatgccggtacctggccgaagtttgtcgtgtaggtgaccaaaacaaacggagtgtccacgtggtccatttcgtccaccttgcgtatctgctgaaagcctgttttattcacaaaccgctgaacattccctgttttcgaatcaaatatgatttgtaccacgttttatcacgacctatcaaaaaatatgaatctctcatcactaacactatatatagtatactaccctctagcaaaaacacaatatatagattcgtttttatgaaaaattcatattttgatcaaatcaggcaaatggacagactcattagggcccaaaaaagagagcagaacgagaatcatctctcgtcctactcgaggtgtcgtttttagccgatgtatatcataacatgaaaaaaaactgcttagtagtctagatttttttttcttaagctatcacagcatttttcgctctctactgtttcttctatttcaacatccgcgccgatctcttctaaaaccgccttcaaagcagtgataattgacgcttctctgattaattcttttccgttcacaatgatacttgttccgtattcatagcaagaatcatcttcgcaaatttcttcccaatgattcacgatcactttatgcttcatgttttcaccctctgtttgatctgtgtctgtatttagtttagcggctggaatccgctttgtaaattcgaatgcttgtgaattttattcaagctcatcatccgcgtattctttcttcagctttacctcattgcgggactcattatactcataaattttgatatagccgtcctccatcacgccaaaatggttatgttcaagtggaaacgaggtgggctgaggcgtttcatagtctgaattgccgctgtctgtttcaataatggtatcttgattcccgcacgccccgaacagtaaaaagacagctatccatacaagtgcaatcctgattcgtctcagttctgcttcactttcaaacaaggtcgatcactcccaaattcattttatacataatataccattttcacttccgtatgttgttctcataaaaaaagaccgtgccttggcatggtcagcttacacaaaaagcttggagcaaaagtggattcatgttaaaaatggccgccgggaacccccggcagcctttcctcatgtcttgacatggcattttttgatctattcgagttcaagctggacgtttttttgcggcgcaaacgttgagatcgcatgtttatatataagctgctgcttaccttccgattccaacaatacggtaaagttatcaaagcctttcacctggccccgcaactgaaagccgttcagcaaaaaaacagtgacatacgtattttctttccggatttgattcaaaaactgatcctgaatattaatcggtttcatgtttcgtcctccttgattctctatatcatacattttcgattaaagttcgagttttcctgctatatgtgtgaaaattcccttttttttcagctccatatcaacaggcggtgtcatatcgaaccatgtgacctgcattttgttgcgaaaccacgtcagctggcgtttcgcataccgcctcgagttctgctttagctgttcgacagcatcggaaagtgtcacaaaaccgtcaaaatatgcatacagctctttatagcctatcgcctgtattgattgacagtctctcacgttcttgtcgtataagcgtttcacttccggaagaaggcctgactgcatcatcatatcgacccgctgattaattctttcgtaaagcgtgtctctatccattgtcaggccaattaacactgcattgtacagaagttctcgtttttgttccttcaaatgctgggacatcgtttttccggacgtatgtaaaatttccagtgcgcgaatgactcttcttgtattattcggatgaatcgcagctgctgcctcgggatctgctgcagcaagtttggcatgaagaaagtcagcgccttcccgctcagcggccatttgcatgctctctcgaaacacgggatcatttgcctcttccgtaaatgtataatcgtaaagcacagattgtatataaagccctgtaccgccgacaatcatcggaagctttcctctatttgcaatctcgctgattttatttcttactaagctttgataatcggcagtagagaaagagtcttggggatctaaaatgtcaatcagatgatggggcactccctccatctcctgttcggtaattttagctgttccaatatccatccctttataaatctgcatcgaatctccgctgataatttccgcgtttaaggatttggctagctgaatacttaaattggttttccccactgccgtcggtccgactaaaatgacaacgggctgcttcgtattattcaatatgtatcactctcttttataaatctccccccattatagcattcaacatggacaaccacctatccattttgccctttttttgcatcggtaaacatccttctaccagccgagcggctcattgccgacaatttcccttgtctttcctttcagggtatgacgatgcgtttttcttctgtcatctccgggatcgtacacaacccctccgtactggatctcaatcggctcgttataggccagatatgtcgtttcttcgatttcatgataatgtgtgccatctgctaagggaatcgccggccctgagattccgtaataccgatgaaaatggccgttttcaaatgaagtgatccctgtatagtaatgtgtatgctgatcggtatttgatccgtttgccggctgagtaaacccttcaatgagatgataatggccctgttctctcgttgttttgacatgataggcatgtgcgtggggcggtgcttttgaccagtcagactgatacaggcccaatgtgttcacatcctcctttttctcgattcgcccaatcaaatccgggcagggtgaatacactgcatcatctacactttattacaggaggaaagaaaacatgaacgagttagagcatttcagccctgaagatacaagaatatttggaagaccgttcggattcgggagaccatttgggtttggaagaccgttcgggttcggttacgggtttggaagacccggatttggttatgggtttggccggccattcggattttttggaggaccgtttatcggcggccttgcaggcgggcttataggaagcgctttatttaatccttatttttatggcggatacccctattatccgtatgccccgttcccttattattattaaacgcaaaaggccccttaaaaaggggtctttttaagtgtgtgaaaatgaatctcttgactcatacataggcatacactaatatttttctagctgaagttttttttctaatctaaaaatatagtgaggagaattcatgatgttgataggatatatattcctcacgattgccatatgttcggaatcgataggagcagccatgctgaaagtatctgatggcttcaaaaagtggaagccaagtgctttggtcgttattggctattccctcgccttttatatgctgtccctgactttaaaccatattcccctgagcctctcctatgcgacttggagcggggcaggcacggtgctgacgacagtgatcggagtaaaatggttcaaggaagatctgaatgccaaagggcttatcgggattcttttattactatcaggggtcgtgttacttaattggccgtaaaggagtgatgaagatgagaggattgctttatttggctctcgccattgtatctgaagtgtttgggagcacgatgttgaagctttcagaaggatttacacaagcctggcccattgccggagtcatagtcggatttctttctgcttttacgtttctaagcttttctttaaaaacaattgacttatcaagcgcgtatgcaacatggtcgggcgttggtaccgcgcttacagcaattgtcgggtttttgctttttggcgaaaccatcagtttaaaaggtgtattcggtctcacgcttgtcattgcaggcgtggtcgtgctaaatcaatcgaaagcccacgctgaagataaaaaacagacggcctgtgagtgaccgtctgttttctttattctccacccagtttcacagaggcttcaagctgcagctcgacatttccttgaattgcacgcgaaatcatgcatgacgactccgcttttttacaaagcttgtgcgccaatgcgacgtcgtcttgtgaagcatcatgtttaagcacgacagagggacggtgaatgatctttttgtatgtaaagactccttttgtgacgtcgacaatgccttctgactccatctgtaagccttctttttccagcccgcttctctccatcatcgctgcaagtgtaataatgtaacaggtcgctgccgccccgagaagcatttcatctgggttggtcccttctcccgggccatccatttctttaggaatggaaatcgatgtgatcaggtttccgctttcgatcgtaccgacatcattacggttacccggccagttcgcttttaaataaaaatgatgatctgccattgttttgcctccttttttatcctatttcagtctactgatcttctcttattttgtcttctgatctgcttgttacgaatactctttttccaggacacctttgatcgcactgacataagcataaaattcactgttctttgtgtattttctatttttataataaaaatcatcaaaaaatgcttctctctgctcacggctgatttccagctggatacttagccccgtttccccttggttattaatgttttcggcattcaatccagcaagaccgcttttagacgacgctaactcagcggaaaaccctctccgctcaagggctctcacaatcattttcgcccgctttcggtctgttccccctacaagggtattcttgttctctcctttatatccgtgaaaagccaccacatattgatgctccttgattttcttttttgccaatggctcatcaaagttggtgcttgtaatgtgcagtgtttggttatcatgggacttcaacccttcaaataggtatgtagagtattcattattgaaataacgcacaagctcacttactccgccttcaattcttccgccatgcggagacataattaagactttgcttccttttttctcattatatgaaatatcgtaatcggctgggctctcattctctgccaagctgctgaaatttgaatatgtatctggctgatttgatggttctggttccaatgagtaatgaacatatctcaagaacaagacaatggctaagactaatatgacatttagtaaaaatcttctcatgtttaactcctttcataagaatggcgcggttcattatatgaggtttagccaataggttttatcttaccattgtatacacaatatcatcagtgaaaaagttcccggtttcaaaaaatcaattgattgtcacggttattagcggttcatttcaaataagagtgaaaaaaggttgagaggaaagacaaaaaaggtaggaacaacctcacttggcaaataaatgtatataggtttaaggagggttttagtaacaggttgcccggttgctgagacggacagctgttaccggcctgcagaatagagattttgcttatttgttctcacaaaatcacaggagaggatagagtccaataaaaatgttctgatctgttgtttcgaaaaacaaaatgctttgattttcgttttgcttttctgtctcacaataatcgttcttttactaatcgttccgtctttcttcatatatataatgctgattggcatttggctttccaaagatcggtgcaagtagaaattcatacggttgctctccccttcccagtttgatatgatcacattataatacgaacaaacgttctttttcaatccccaatgatttcctcagcttctgaatctatcgtatctaatgcgaaagattcagaaaaacaaactcttgtctgtctcttacagaggacaaacaaacttaccaaacctatcatctgttcatagagtatacagagaaccttataataggaggaaaatacatgtttgggtactctatggtacaaatggtgagagcaaatgctcacaagctagattggccgttacgggaaaccgtattgcaactttacaagcccttcaaatggactccttgcttcttgcataaatttttcgaaaccaaattgcaaaacagaaaaaaaatgtcagtcattatcgaatttgaggaaggctgtcacgagaccggctttcaaatggctggagaggtgctgcaaaaagaaaaacgcagcaagctaaaaagccgcttcaacaaaatcaactgctgcagcgccgaggttactccttcagcattacattcccttctctctgaatgcagcaatatccgtaaagtgtatttaaaccgcgaagtcaaagcgcttttagacacggcaaccgaagcaagccatgcgaaggaagtcgtcagaaacgggcaaaccctgacaggaaaaggtgttactgtcgctgttgtcgatacaggaatctacccgcatcctgatctagaaggcagaattatcagattcgcggacatggtcaatcaaaaaacagagccgtacgatgataatggtcatggcacacactgtgcaggtgatgtcgcaagcagcggcgcatcctcttccggtcaataccgcggccctgcaccggaagccaatctcatcggcgtaaaggtattaaacaagcagggttcaggaacgttagcagatattatagagggtgttgagtggtgtattcaatacaatgaggacaaccccgatgaaccgattgatattattagtatgtcgctcgggggcgatgcccttagatatgatcatgaacaggaagatccgttagtcagagcggttgaggaagcgtggagcgcagggattgtcgtctgtgtcgctgccggaaactcaggccctgattcgcagaccattgcaagcccgggcgtgagcgaaaaggtgattacagtaggtgcgcttgacgataacaatactgcaagcagcgatgatgatactgtcgcttccttctcaagccgcggcccgacagtatatgggaaagaaaagcccgatattttagcgccgggtgttaatattatttcccttcgctctccgaattcttatattgataagctccaaaagtcaagccgtgtagggtctcagtactttacaatgtcaggaacctcgatggcaacaccgatttgcgcaggaatcgcagctttaattcttcagcaaaacccggatcttacccctgatgaagtaaaagagcttttgaaaaacggcacggacaaatggaaagatgaagatccgaatatctacggagcgggcgctgtcaacgcagaaaattccgttcccggccaatagaaagcaccaaaaaaccggcaattctctctcagcagaactgccggttttttcgtttgaatattcataatcataaggtaaaataatggaaaatagatgaaggaagtgaagaaagtgccatattatatctgcaatacatgcggtgtgcaacatgcacagactgtagatccgcccaactcgtgtctgatttgcgaggatgaaagacagtatattcatcccgatggacaaacttggacaacccttgaagacatgcgtgagaaaggaaaccttcaaaacatccttaaaaaggaagaagagcatctttacagcatcaaaactgaaccagagtttgcgattggacaaacagcccatcttatccagcataagggcttcaatgtgctgtgggattgcatgacatatcttgaccaaaagacaattgaccaaatcaacgaattaggcggtattcaagccatcgccttgtctcatccacattattactctactcaagttgagtgggctgaagcgtttcaggcgccgatctatatccatgaggatgataaagaatgggtgacaaggccaagcaatcacattcacttctggtcaggggaaacgctcaacgtgaagccgggactggacctttaccgactgggcggacattttaaaggcggtgctgttttgcattggagcaagggcaatgaagggaaaggctgtctattgaccggagatatcattacggttgcggcggaccgaaactgggtcagctttatgtacagctacccaaacctcattccccttcccgcctccaaagttgaagaaatagcagccaaagtaaaaccgcttcaattcaaccggctttacaatgctttttctaaagttgtcaaagaaaatgccagtgaagcggtccagcgttctgccgtacgctatatcaaggctctcaacagcgaattgtttcatacataaagagtgaggcggctcttttccgtgtaaaagatgcagcaattgggaatagtatcgtgtagatcaaaaggaggaatattgatggcacacacgaatacacagctttctcaatggctggaatcaaaagtcggccagacgcttgatattagaaaaggtgaattgacccatgatgaagagatatcagacttggatcagatcgttctccaccttcaaaaagtggctatacgcagtacgaatcatcctgatgattatgttgcgaaagaagagcttgttttagaaggcgaaggaacaacattcactgaggacggaaacgtaccgcttccgcaaaatgcctatgagattcctttattaggtgacattcatattcaccaagaaaacgaaggattgaaggtcgtaacagatcgtgcagtatatacaattgatatccagcacagctgacagccactttcatcaaaataatacagcgtagcgcctttgagctttcgttcaaaggcgctgctttatatcgagctatccagtaacacttattaaatagatcaaggcactttattgaaccgtttttatacagatttatcattattccttctcttctgtctcacgtttaccttccacgcaaattgactctacatgctgcataatgacccgcttaattcggtctttattcacgcgcacagggtcaagcatggcatgtaaagccaagccgtcaacaagcgcgtaaagtctctcagcttcaatgtctttatcagcattctgcttcagtaaatcggattcatctaaataggcaatcagattccgcatgccgctgaaaatcccgtcatgattcgcatcaaacatatcctttttatgtctggcgtaagcagtaaaagcaaaccaaacctccatctctctaatcgtttcttcattcgttgggaccatttcaagcaaaatttgcaacactttttccttagggagcaaatccctcactgcaatgtccttaattcggtccgtcaccttttcttggacaagtttcattgcaaaagcaagcaattcatcctgtgtagagaaataatggcgcagcgcacctaatgacaatcctgcttcctttgcaatatttctggctgatgctccctccatccctcgttctaaaatgacgcgccacgttgcttctgcaatttgttttcttcttttctcatggtcaatttgttttggcatagctttattgtaacaagaaaaaaatgagagggcaatttttataatacagttgtgttacaaaaacaaagatggtaacatattatttaaataatacaactgtattgaaaagagggaatggattgaacggtatcgcatggatgattgttttctgtgaaattgcgttttgggttgtcattgttttggggcttgctgtacgctacgtattcaaacgacatacattaggactgctattccttgccttaactccagttatcgatttgatcttgttagcggcaactggtgtggacctttaccgcggagcctcagcgaccgcagcccatgggattgcagctgtttacatcggtatatcgatcgcttatgggaaacaaatgattcaatgggcagatgaaaagtttcaatattatgtgacaaaaaaaggaacaaaaccgctgaaacgttttggaatgaaccatgccaagcacggtgcgaaaggctggctaagacatgtgctggcctacttaattggtgcgggactattggcagggatgatctattttatcaatgactcttcccgaaccgaggcgttgagcggcattcttaaactgtggactgtcattataggcattgactttctcattacagccagctattttatttggccaaaaaaagagaaagcttcggcgaatctcaggagttaacatgatgaaaaaggcccttccccagtggaaaggaccttttttggttttgttaaaatatgctatactattttcgttagaaaacagacttatagatattttgggctgattcaagggtaactgtttgtacgagtaagcaggtgaagggagtgtcatacatgaaccaaaaagaacagaacgagcactctaaagattttaacctgagatcaaaattaatcggaattgtatctattacttttatcgcggccatcgcgcttgcagtcatcttcggcggctttttcttcgggatgaaaggcttattctccatacttggcatcacatacgcttccaatcaaacattagctttatttattttagcctgctttgctgtaggtttaatcatagacccactcacaaagattatctctatcattttggcaaaatcactttcattgaaaaagactgcactttttgcttttatactgtattttatcagcaatcttataacgatctgttttgcagattactttatgcagtctatttatattccagatgtcttgcttgttgtgatatcagctttcatggctttcattgaacttgcttttgataaccagcctaatagagaagcagcttaaaatgccgatggcagatataggaaattcataacaccctatatttggacatcaccagttatataaacgaaaaaaactccctgttcacacgaacagggagcaaaacacaatgttgtaattaaattctgcattctaaaatgattcttacattcggatcatcaagttcatccaaaaagataatgatcttcggaccacatgccatgtgcttccaccccctcacccaaaatatacattaatcccaattgcctgtaaatggaaattttgttatacagaggaaccatgaagtataatgcgttaacactgctcacacgtttacaaccgtttcttataatctgacactccaatgcctaccacccccgctacgataggaaatatcgttggtccaaaaggtgcaggtgccgcagtgcaaaccactaccaagctttctaaagtagtaaagtggttaaaggtggaacagtagcaactcatatcaataaagggataaacaaaggaaaagcctatatcaattctttcattaaaagtaagaatgatcttgcacttgtcgggattgctcaagacatcgacaatacgtatagcgcaaaaaacactcctctgctaaaaagtattattggagataaatcggtaagactgatgaagagttattacagaggtacagataaacaagaagatacgtgcttcttctagtttcactgataggccaactgcagaaagagtcgctaatgaaacattaactaaactataaataggaaattaaacagtggttaaatagtgatattgacgatacattaccgttgccttacagaggaaaccgaagttataggatgagaagttcgtaaatgttcaaatgaagttaaaaatatgactaacgctagaatagtattaaagaaaaataaagattgatgatataactccattagaatggcttgagcaagtcattgaacaaattaaagaacaccttaaaacattatagatataaaaggagcccctcttattgaagagggcttcttttattgtttcaatataccttcagtcatcatctgcatagcggtcaacatcttgaaaaaaagatcaacagcccatctgtgctttttgcttgccttgatttcaccggaacggattttctcagcgtatgaccacacccgttctatgagaatttcggcagtaatttcttgcattacatgcggcctccgaaccgttcttcctcttttgacttcggtttcccatcatcttttttcgggatgacgagtttacagcgagaggaaatggtcagtcctaaatcgcttgaagcttgccggcattgtttaaacaacttgtcttggtttatcaatagttcagaatagtcatcattcggaacaaccttttcttcttctcctattacattcccttcatcgtcaaattttctaacgatcactgttttcatcggaccccgttcaagcaattgctctgttacttgcaaatataatttccgggcaaacaaaaaacgggcaagcgcatcaacatctaaattggtcataatcccgatgtttttcagctcgtccgctatctttttaaactctctttttaagtcttttggtaaatatgacggagcttttactttgtcgcttggtgcctttatttcctgtgctcgacgctcctcaatctcttgctgcgtcaggtgtttcctccctttcaccagtagcaagtcgacaggttgccgcggtctagccattccctcacctccttccgaattttcatttagggaatttttcaaaatgggaaggggagcgcggtctccggcgttcatccctcagagattttagggtggggggtgctcattttctctttcaactgcagcatggcggcttctaatttcttttgttcttctgttaatttctttgtatacagatcgaatgctgtttcctttttcatcgttgcacgaagagcaaacagtttctttaccttctgttgcatacgtcttatgtcagcattggtgtaataggatgtatactcagtccgacaccgaggacacttgatattgctcacggatgccgtcgtcatgcttcctgacctttgagcaccctctgaccaagagcattgttccacattcatcacacatgcacgtttgatgttctgttcccaaatcctccatcctccttcgctgtctttctgctgtggcacggcgcacataagggttgccagttgcctgagtcccaaaagagtttcttgtctcctttatgcggtttgatatgatcgactactgttgccggcacccgtctaccttccatcatgcacgatacacaaaatggatgctttgacaggtagccaagacgtgcctgcctccacttgctgttgtacccccgtttggtagcggactcccggtattgatcataggctggtttagttcgcatgtgctgttcgcagtaactttctcgagtcaggttagagcaacagggttcaccacaaggttttaatgattttagcattctatcacctgcgtaaataaaaatagacctccaaaagaggcctgtcatactagaaatccatttccttaatcattcgatcttgctttgaggttaatttattttgaagttctatatatatttgacttaactcctcaaaaaagtttacttccaattggtctacgttatcctttagttcttgtatttttttacttaatttatctaaatccccattaaaatcaccttgcatatattcatgaccatgttcgttatgaaatttttgggttaaaacttctgcagtattgtaatacttttcgatagcaatgattttttctttaaactcaatccaaattttatatccttcaccatctacaaatataagttcatctttaaatttctctaagtaatcaactgtaaactctttatatgaatctcttttttctaattttaattgtccagtcaaagaaaaaaagtatcgatcatttatataattgttgtgcctaactccccgaagttcaaatttattaatcatatcaacatctgttattaccttatcaagcctatatagttgttttggtaattcatttctgtagtataaatcttcattagctttgattgtctttttaacacctataaatgttatacctcctccaattattgcacctataaatgcaatacaggcagataatattgtggtatcaatttcaccaaagaaagctttagttacaccagcataaattataagatcaaatagtattatcgaaaaaataataatccaaaaaacataatcccaattaatttttgtcgtttgcttattcattgctttcactcccaccatatattatcggcgaaagagaagaaataaggaataatttgcggaatttgtcgaattatttacgaacaagcttacatcttgtttcaacgaacaatttagtttattcaggaaccgacatatcatacaaagctgctcccttttctccttcatagcatccaagagacacaagtgtttctataaatggcagcttactttccttaatcacggcactacctccataatagaatatttagtacatagttttttagggataaattccaatgaaaaggcgccctcctaattgggaaagcgcctgtcgatttattatctattaccatgataccttacttaaaaagaaatggtgtgcctttatcctgccaagtttatgccattttattatttatcattaataaatcttaagtacttcatttcctttattctatctttaaaaatcaacaaacttattgtaatcatgcataatgatattactaacattattatgttatataataacatggcagaacgagaaacagattctattgaatcccgactaccaataccagctatcattaatccttgtattagcgcagtccacaatataaacgtttgagtgcgtttctctaaagtattgtctgtataatttttaaaagagtttacacctttaatagtaccttttatttcatgaggaccggtgttatctgtatgtaaaacctctattgcggccccatctccgggatctaaatagtcaaattctatgtacaatatattaagctcattggcattatgtttaactgatatgtcatttgtaaatttagtttgatttaggattgacgcagaaataatctcttcatcgctactaacttcaaatcttataggatctttcacggaagtatcttgaccattaattgtttggttcccattatttctaattttgattattgtattaactaatttattaacagacttacctttaaccgtaatctcaatatcttcagttgcaaaattgtcttttccaacaactctacgagtatttagcaaatatgcaaaatcacgtttgatttttccctttgaatagaaataaaacgaaatgaaaataccaattattattccgataactcctatcaacgaaccgacccatccttgactaaacaaatctataaatttctccataagcaaacactcccaaaaacataaatattattaatacatattaattccaatcatggcaacaaagatttatctccatctattcggatcgactgaactctttataatttgtcattttctgctcctatataatgcaaaaaaatagaccacggcttatgcgcccgtcgtcttaatttttccttgatcatgcaatacgtaatcagaagggtggaatatctttatgtctttaacccattccaattcaatttcgttatccgaataatttttaaaattatggatactataatcactggaaatacaatactcagcttttccatcaatcgcgcattctaaaaacatattatcattcggatcaacgcatgaggtaatttgggtactggtttttatttttgtagcattcaaactaaatacgcttactgctctcaaatactttttggggttaaatgaaactttctgtttcggagaattctttgctttttctaataaggcataaacgacaataaaaagttcctttgccatttcctccgtcataagcaaatcaagtcacctttttttagttttctaattatatactctggatccttataacctctgatcagcccatctactaatgtagaggtgtctataactgcttttacggtcatgttatcttggcaaactcccttgcttgagagattatatcctcaatctctccatcctcaaacagatcatcagccaacagttcccccaattcctgtaaggcttcaattgattcttgaaattcagcatgtctttcagtaattacttcttgttcacaagattcattttctcaaagagcttctaaaaccttcatcatccattcctccttatgatgatgtgacaacacaatccctcctttctgacttgtcggccaaattaaagaacaagttggatagtaaaggatatggctgtccgtatgaaaaatataccacctaggagtggcaaaataaacaaatatgtggattccgatgttatttttttactatggttacccacaaatccacgaattccccatatgttttatactgtgcaactcgtcgaactgagccaaccccttgtcctctctgtttttaaccaatatccctaaaatgaattacacacctgttatttttgaggaattgacgaaaaatgcaaagaaaaagacccatccttattgttttggatgagcctggttatattttaaatttcttcatagcgttgttcatggcgtcttgattgattccgatataccgcaaggttgtccgttgatccgagtgattaaatatctcctgcagcatggcaacgtccttcgtttgtttgtaaaagtgatagccaaatgttttcctcaatgtatgagtgccgatgtcatctaaaccaacatactcagcagccgccctgagaatcttgtatgccatcgaccgggagattggcttgttaatcccttcacggcttttaaagagaaattcatgatcctctttcccttcgacataggccttaaattctctttgaagagctggcgtcatatcgattctctttttctttttcgttttcttctctatgagattgaaataaggacgtttggcgtctcttactctcagctgcagaatatctgatatgcggagccctgaattgataccggtcacgaatagcatataattcctcatgttttgctcttttaaaaacctcttgatgtaaaagatgcattccggatcacgtataggctgaacaaaattcattaagaagccgcccctttcttgtagacttcttctctcagagcaaacgccagccgatagaaagcttttgcttttatacgataatagctgcgctgactcaagcccatttctgcatatacctcataatcatacatttcttccgattgcatatagagcatgacaatgatctgccgttctctttgagaaagccggttaacagccctttgaatcctttttaagaatttgtcacgctgaatctcccaatcaagacgctttaatgctgcctcttctgttgaggaatgaaactcattcgtgatacttggcggaacaatgctataagtaggtgtaacctttggcaaaaaatcatctggcacctgtaagagatataaccggtattgatccagcagcttctctgcttttaatttagtcgcttcttcgtcaatctgaggaatgtttaatgttaattgattcatatttttaccctcccatttgtttacgtcttaaagccccgcctttgcctctttccaatgtttccctatattggacccatcatttgccgccaaaaccgttcagaacgctcctgctcgtttttattgggctttttcttcctcttcttcatgacgtccctccgctcaaataaaaaacggacaccaatcaaagtacagatttttctgtacagtgattagtgtccgcaggcatctccatcttggacttaattatatcaggtttaaccatctcgataggtgtgttatatagttcttctttcctcttgatcatagttttagtgcataatctatggtcatttttatttcctaacaagacagtctctttatttattgaatataaaatataccatttttcttttttttcatcttctatataaacaatttgttcgcttgaccatttaataattttggaaataggttttaaaataaaaggaattggaagcgtaaataagattaaaacaagcatactccacccaaaaactttcaggttaaacttatccttttccgaaaatggtatatctataatgaagctataaagctccatataaaaaagtattaaacaaatcataaaaactaaaacaaataaacctttacatagtctactagacttgatttttgaaaaagctccttcatttgttattttcactacaccccatataattccaccaaaaaatacaatgacataggaataaaaatcattaggtccaggtataacatccctaagataaaatgttgttggatataaaacaatcacccaaaataacgtattcaaaatatgtttaattactttcaaactaaacacttgttcttttgaaaacaacctctgttcaacaacattcgaagaaaaaagagtaatagggtttaaaattctaatcagatacaaagcgagaccaactagcaaaataacgtagctaggcacttcaaaataacttaataattcacttaaatttttttccatttcaatcttcccactttccacaattcaatattttcctattcatcctattttatcaacttataatctcctcctcaacgcccatgctgcggccgcatttcgggcagcgtgcacctgggcgaatttttatatctaattcgttgtaaccacattcagggaagttgcattcgatcataaaacaagtttataaataattaacatttatttacaaggaaaataattactttcgttgaatccttatggtgtaacacaaaaattcaaaaggagtgtttaaaatgaatttcaagaaaacagctgtttctgctttatcgatttctgctttagctttgtcagttagtggtgtagcatctgctaaggaagtaaataactctccgacacaaattcaagaagctaagcatgtttctgtctcagataaaatttctattcagagctattctgttaccctctatcttcaggaagggccaaatcaacatgaaattagagaaccgctagccacaagctttgcaagtgataattcgtatgttgcatctgtatcttctagagggataataaccgctaaccacaagggcaatgctacgattactctctttaaaagtaatggttctgtattaggtgctgtttacgttactgttgagtaaaaattacgaggggaccttcccctctctcatcttttcgaacccgtcatcccctattcccagccgacagcgattgcaaagaataaaaccattaccatcgccccaatgagccagccattcgtcttgtctctttttgcaataattgcgtcattgcctattattttcagatcatcagcctgagcaacgatcataggcacttcctcgacattaacctttaaatgttccgccgcctgcccaactgtcatcgtttcgtctttcgtggctttgactgcccgctgaagctctacttgtaaaggaatcattcctcagcacaatccttttgccagtcagcaatgatctttttagatttctcagatattgaatacagataggcatttgtataaaacgttcttttgcttcaaagaaagcacggtcaaatccgaatcttgagaagtgaaccggtatgtcctgaccctcggaatgcttttgtataaagtcccgcacgctgtagaatcgctgtgtatccgctactgttgattccccaaaacaaatgaacactgccgccgaatgtcatgtctctatgtctagtggttaaaatcagatattcttttatttcgcgtttctcatgagcttgcttcaattccccatttagccgctgaatctcttcttgtgcctgccggaattgatgtaccgtaacttcctgctggcgcttgttttcctcgatgatttcctgctgcttaacagacagttcagtccgatcaatcagaaaatcaatatgctctttagccatccagtattgatcagttggcttagcattttcatagcctttcagttttgaaatacgcgctttaatttcctgtaatttatccatgtctgttcctcccttatcgcagagaagaccggcccctctgcgtcacattttatagccgatctcaaaatcaattctggagagattaccttttgacgtttgtacgattgttttaccgtgctccggcatttccgttaatttgaatgatctattgtttccgtcaatcacaatgacgtaatttttgtcattttcaatttgattaagtacctgttccagattttctatatgttttggacagttctacgggtgacgtctactagatgactgttatcacatccaatcgttcattgggaaaacttgcagcttagtctatggttcttctgttgggatggttggatgtttttttatatagtccaaacgctcctctttcgtcgtaatccatgtaatgacttccctatgctgacgtaagtctttattttctacagtcaagatgacttcaaatgtttaaattcttatcactgaaagaacacaataaaaaagcattaagttattccgaagaatatctcaatgcttgaaatgtgtagacaaaatatagaaaaggttatattgcccttcaccaaaccccgctacatcacgcgtttgaacatcttttccatctcatatgtcgagtggtgaatgatgatcgggcggccgtgcgggcatgtaaatgggtctgatgtgcttcggaggtcgtcgagaagcgctttgatttcatcgtttctgaggtggcgatttgctttgatggagcctttgcagctcatcataatcgccgcttcctcgcggagttttttaatatctatatttttggagtcgagcacctgctgaatgatttcttctataagctctgcttcttctccctttggaaaccaggccgggtggcagcggacgatgtaactgttggagccgaatgactctaaaaagacaccgacgctttcgagctcttgtttgtgctgttcaataatcaaagcctcatttgtggagtagtggaacgtcagcggtacaatcatatcctgcacctcaggctcaacctcccccaccttttcacgaaagtactcatatttaatacgttcttgggcggcgtgctggtcgataatatacaggccgttttcgttttgtgccaatatataagtcccgtgcatctggccgatcgggtacataatcggaacccgctcagacgctggctgctgctgtccctcatggcattcctgctcaaatgtatctggctctttcgctgaaacatcggacacctcaaggatttgtttctgatcaacgataggaggagcatcaaattggagaggaggcaattcttcctccgcatcaaccggctctttcacgactgagctgagcttcattggtgaataagatgacgcatgcgatttttccggtacttttctttccggaggcttttcatcaaaggttatgaactgctgctcatttttgataacaggggccgattttttcgggagctgggcactcggaatcagctgctgctgtttaaatacatctttaattccgtcacgaattaagtcatgaagctctgtttccttgctgagccggacctcaagcttcgatggatgtacgttgacatcgactaaaatcgggtccatcgtaatttctataaaagtaatcggatggcgtccgatcggcagaagcgtatgatagccttcatgaaccgctttgacgagcgggaaatttttaatgtaacggccattgaccacagacgacatatagtttctcgacgcccgtgtaatctctgggagggcgatatatccctttacttcaaaatccaaggagctcgcatgcagcggaagcatttttttggcgacagccgtgccgtaaatcgctgccagtacatggcgcacatctccgtttccgttcgtttgaagcaggtttttcccatgatgtcgcaggcggatcgatacctctggatgcgccagagcaatacggttaaccacgtctgtaatgtttccaagctctgtatgaacggttttcatatatttcaaacgggccggtgtgttaaaaaacaggttggaaacgacaatttcagttcccttcctgcttgaggaacgcgattcggaaatgatgtttcctccttggaggacgagcttcgtcccagctccttcaccagtgcttgttgtaatctccagatgagagactgacgcgatactcggcagggcttctcccctgaaaccgagcgttctcaccctgaataaatcattttcatcttttattttactcgttgcgtggcggcggaaagctcgcttgcaatcttcattctccattccttcgccgttatccaagacccgaatggatgcaaggcctgcttcctcaatatcgatttcaatgactgtgctgtcagcgtcgatcgcattttccaccaattctttgacgactgaggcgggccgttccacaacctcgcccgccgctattttatttgaaagctcatctgacagctggatgacttttgccacattcatcaccccgttttaatgtaatttcttttgcagcttgtacatttcattcatcgcttcaagcggtgtcatatccagtatattaagtgatttgaaagcatcgatcacttgcttttctttttttgaaagctttggtgtttcagccggcttttccgcttcgtcaaaaaaggacagctgtgccggctcttctttcacctgaggtttctgcaccggcacttccggtttgtttcctgaatgctcaagctcttttaaaatatcttgagcgcgcgcaatcagatctcccggcagttcggcaagctgagctacatggataccatagcttttatcagcggcaccttctttaatttgatgaagaaagacaaccgttccgttatattcttcagcgcgaacatgaacgtttttcagctggggtagcttgtcctcaagaacggtcagctcgtgatagtgtgtgctgaacagcgtcttggcgccgatgtgatcgtgaacatattcaataatcgcctgtgccagcgccatgccgtcataagtggacgttccccgcccgatttcatcaaacagaatgaggctgtttttcgtcgcgttgacaatcgcatttttcgcttcaagcatttctaccataaatgtactttgtccggaaatcaaatcatctgcagcgccgattcgcgtaaaaatttgatcgaaaatcggaagcaccgcttttttcgcgggtacaaagcagccgatttgcgccataatggaaatgagcgcgatttgtctcatatacgtgcttttccctgacatgtttggacctgtaatgagaagcatttgtctgttatcgcccatcatacagttattcgggacatattcctggctgtccatgactttttcaacaaccgggtgtctgccttcaatcacttcgacttcatctttagagaactctggtttcgtgtagtgacgattttcactgattgtcgcaaagcattgcagtgcgtccagctcgctcatctgttttgcaagctgctgcagccgcggaatatactgcttcactttctcgcgcagctcggtaaacagctcgtactccagctcacagatgttattttccgcctctaaaatgagcgcttctttttcttttaattcaggtgtaatgtagcgctcggcattggttaacgtctgcttccgctcataacgcccttcctcaagcaaatgcaagtttgctttagtcacttcaatgtaataaccgaaaactttattaaagccgacctttaaagagcgaatgcctgtgtattcccgctcctgctgttccaggcgggcaatccagtcttttccgtttctgcttgcatcacgatattcatcaagcttttgattataaccatctttaatcaggttcccttcttttaccgataaaggagggttttcgtacagcgcttcttccagcagttcaagtacatccccgcaagggtcaatgcgctttgcacgttccttggccttgtcatgagccaatgaagcaaccagctgtttgatgccaggaacttgctttaacgattccttcagctgaatcaaatcccgggcattgacatttccgaatgcaacgcggccggcaaggcgttctaagtcatacacttcttttaaacgttcacgcagatcttcccgttcaaagaaatgggacatcaatgtttccaccatttcttggcgctcttcgatttgattgactctgataagcggccggtcaatccactgtttaagcagccggcctcccattgccgtttttgtttcatccagcagccacaaaagggagccttttttatttttcgaacgaatcgtttcggtcagctccagattacgctttgagtacaagtcaattttcatcgcttcctcaagctcatacacctgcacgggctgaagatgatcaaggctgcgcttttgggttcttttcaaatacgtatataagcgcagaaatgtttttgttatatcttcattatttaagtgctcaatgatcgttacgtgttcgtctgtttctccgtcttcaattgaaattgttgcaccgcaccgctctctcagctgtgccactgtatcggcatccaagcttcctgaaaccacgatttcccgtgcgccgactgaataaatttctgatatgacgtcttcaagccgttcaatcaaaacagccaaattttctcccgttgttaaatcagacagcgcaagtccgtatctgttcgagcaggctgaaacagatgcgataaagttattttccgattcatggatgcctttgccgtccattacagttccgggcgtaatcagctgaaccacttctcttttcacaacgccctttgcggctttcggatcttccgtctgttcacagatcgccactttgtatccttttttaataagctgttcgatatacgcggaagcagaatgatacggcacaccgcacatcggtattttttcagccgcaccgccatctctgctcgttaacgtaatttccagctcttgtgacgcttttttggcgtcctcaaaaaacatttcgtaaaaatcacccaggcgaaaaaataaaaaggcatcctggtgctctgcctttatttttaaatattgctgtatcataggcgtataaccggccattgtttaatccctcactatgtatcaacgtttctattttccaaccttcattataacataaacaaaaagtgataaaagaatgatatatcaatataaaaaagagacttgggggtactgtctcccctagtcccttttttattcttcaggatctcccactaaaaactccgggttgatgtcttcaagctcttcatcaagctcatcttcccaatcttcctcgtcatcctcttcccagtcaggattgacctcaacaactacctttgtttcccctaccacttccgccaaaaattctctttctgcctgcacaacgattttatttccattcggcgaaatggtcacttcaaggcagtttggctgctgaagcactttggcaatcacttcatgctcatcatctaagtaattattgtctctgtatctgagtttaatgacatctacatattttacccgttctgtgacaacctctgtctttgtgttgtccgcgtaagagtaccatacgtttatatcataatacccttcaatttctaccgtttttccaattttttcagcgtcatacttgtggttaataatccaaccacccaaaatgctgctcggttttttctcaggcgagatggtgttggtgcattgggtgaattttcggcctttcgctactactgccttcgtaataatttccctgtattcagacattccggcatgcctccttgttcttcttcgtgttatcttatgctgggcatttgtctagtgtgcatttttataaataaaatataaaaatacaaagtttctgttccattgtatgcaggtgtgcctagaaactttacttataagtgcgataaagtttacacgcggctgagcacagaaaaaccaattgaatatttagtacatagattatttagttcatttataaccgcacaaatgatgaaaaaacacgggcctgttaaggcaccgtgtttagagagaacagctgttatttgaatgcttcacctttgaaccggtttcccctttcagcaggtcgcctccggttgatgtgatgatttcatttgtgacttggttggaaatggtgtgtgcaacgagctgcagtaggtcatttacttccatctgcgagtctctgaattcctggataacaggaatctcttcaagctcttcttgcagcgcgtcaatttttgcttctacttgtttgagcgcttcatgcttttcataatgcttcagattgacagcctgcttttgcagggctttaatctgattaacgattgtggacactttgtcattctcattgatttgcgcttcagcccgtttgaaaaaatcaacctcttctgtttcagaaatcatttttgcaaggtttcgtgcctgcttcacaatgtctttttttgagtagagcgtcatcttatttcacctcgattgcttctcctaccatttctccgtcaagcgaccatgttttcgcttgctggattttcacgcggacgattttgccgatggcttccttcggccctttgaaattgacaagcttgcttttttccgtatagccggcaagaatatcagggttatttttgctttcaccctcaactaatacttcgacaaccttgccttcgtattccttcatttttttagcagaaatttcattcaccagtgcgtttagacgctgcaggcgttcttttttcacacgcatcggtacattatctttcatcttagcagccggagtgccctcacgcggagagtaaatgaacgtataggcgctgtcaaactccacttcacggtatagagaaagcgtttcttcaaactgttcgtccgtttcatttggaaatccgacgataatgtccgttgtcaaagaagcgtttggcatcgctgtctttatttttcgcaccagctccatgtaacgctctctgtcatatttgcgggccatcagcttcagaacttctgagcttcctgattgaaccggaagatgaatgtgatcaagcagatttccgccttttgccagcacttcaatgaggcggtcgtcaaagtcgcgcggatgactcgttgtaaaacggattctcgggatatcgatttttctcagttcatccatcaaatcaccaagtccgtacgtcatatcttcaaagtcttttccatacgcgtttacgttttggcctaacagagtaatttccttatagccttcacttgcgagccttctcacttcctgaatgatatcttcagggcggcggcttctttcttttccgcgtgtgtaaggcacaatgcaatacgtacagaatttgtcacagccgtacatgatattgacccagcccttaatttttccatttcggactttcggaaggttttcaataacgtccccttccttagaccaaacttctacaaccatttcttttgaaaggtatgcttctgacaaaagctccggcaggcgatgaatgttatgcgttccgaaaatcatatcgacaaacggatgttttttcaaaatacggttcacgactgattcctcttgggacatacagccgcacacgcctaaaatcagatcgggattgttttttttcagtgcttttaagtgcccgagctcaccaaacaccttgttttcagcattttcacggattgcgcatgtatttaacaaaatgacattggcatcgtcaacagagtttgtcgcttcgtaaccgagcgccataaagatccctgccataacctctgtatcgtgttcattcatttggcagccgtacgtacggatatagaactttcttccgtctcccaatcctttaaattgttcagaaattttaaagtcattatgataagtaacggcttccttgcctcgttttttcgcgtcttttaaagaaggcggaatgtaaacagcttcaaagtacttgctgtaatccttctcggattttttgtccgatggattaacttgtccgctctctaatttttgtttttcattcatgtcatattttctcctttcaaaccaaacttccacccttcagtataaaggttattgaagctctgcacaactggcaacctatcattgtacactcattgagaataataatcaataaggaatcaaaagaggaagagtaaactcttcctcttgttacaatagctggagctcctttgccgtcttttcgatgacatcaagcgcctgatccagttcatccttggtgtgctctgctgttataatcgtgcgaattctggcttttccctttgctacagtcgggaaaacgatactttgggcaaaaacaccgcgagaaaggagctgatctgaaaattgctttgccacaccttcatcacctattaaaataggaagaatcggcgtttgactctctatgagagtcaaacccattttcacaagcattgctttaaaataggcagtattctcccacaagcgctccatatgctccggctcttcaagcaagacatcaatcgcttccatacaagctgcagtgacagccgggggatgagatgtgctgaataaaaatggacggcctttatggcgcaaataatcgatcagcacctttgaacctgcagcgtagccgccgagcactccgattgccttgcttaatgttccgacctgaatatgaactctgccgtcaagaccgaagtgattcaccgttcccctgccgttttcgccaagtactccggatgcatgggcgtcatccaccatcacaaatgcgtcatatttctcagcgagctctacaatatcaggcagaggagctatgttgccatccatggaaaatacgccgtctgtcacaatcagacgcatccgataattcattgactttctcagcacccgctctaaatcactcatattgacgtgctgatacacctttttatccgcctttgtcagtcgaattccgtcaataatagaggcatggttcaattcatctgagatgacaatgtcctcttttgatagaatacttgaaagtacgccttggtttgttgtgaagcctgattggaatacaagtgccgcctccgtttttttaaaggctgccagctttttctcaagctcttgatgcattgtaaatgtacccgcaatcgttctcactgatccggtgccggctccatactgctgaacggcctcctgtgcgacgttgatgagtctaggatgtgaagtgaatccgaggtaattattagaagatagctgaatgactttttggtgattcactgtgacagatggaccctgcatagattcaagctgttttatgtcttgccatgtatggttttctttcatactatcaagctctgcttttaaaaaatcaaattccttcgtcatgtttatccccctttatggaattaaaattacttttccgcactggccgcttctcatcagttcgaaacctttttcaaactcctctaacggaaactgatgggtaataacaggttcaagatcgatcacgtttgaactgatcaactgagacacctggcgccatgttgaaaacatttttcttcctgtgattccttggatggtaagccctttaaataccactttattcgtcaaatcaattgtcaccggatgttccggcaagctgagaatatgaaatcttccgccattcgcagccatcgcaagaccttgggcaatcgctgagggatggcccgacatctcacaaacaagatctgctccttccccactcgttaaagcgcttacaattttgagcgggtcttctttttcaatagaaacagtacaagtcgctcccatttgttttgcaagcctcagcctgtattcattcttatcaatcgctatcacctgagaagctcctgctgcttttgcaaccgcaacagccataagaccaatcggcccgcatccaatgactgcagtcgttcctcctgcaggctggctctcaagtacggtatgaactgcatttcctaaaggctcttgaatggaagcaattgacgggtccatatcagcgggatttctccaaatgttatcagctggaacttttacatactccgcaaaacagcctgccgtgtccactccgattatagcagtattggtacacacatgagattttcctgttaggcaagggacacattcaccacaaacaatgtgtgtttccgcagacacatactctcccacttttacactgctgacattctctcccacgtcctctacgatgccgctgaactcatggccgaaaacatagggtgttttgattctctgacgtgcccattgatcccaattataaatgtggacatccgtgccgcatatggaagcggctttcacttttatgaggacttcatgtttatcaatctcaggaatgggaacttcagtcagcacagcaccgaacgccccgtcctttttcattagagctttcatctttccactctgcatgtacaatcctccttgaaaaattcttgttatattcggattgtaccatgatatggaataagcgtaaacagcactgtcttttccagaaggacaaaagtatctgtcttgaaaaatggacggaaatttttttttgaaacgttttagctcatttctgattttgtatattcgctcatttatgtgctaaaaatactatcgggagaaaatatcacaataaatgaaaaacaacctgtttgcattacgcaaacaggttgagaatgctttatttgtttttagcgaggctccacgattaatttaatcgctgttctttcttccccatcgatttgaatatctgtaaaagccggaatacaaatcaaatcaacgccgcttggcgccacaaatcccctggcaatcgccacagcttttacagcctggtttaatgcacccgctccgatcgcttgaatctcggcggctcctcgctctctcaacacgcctgcaagcgcacctgccactgaatttggactcgattttgctgaaacttttaagatttccatttctgctcccccttagttttacaatggataagtgagtgttcattagaacaatcattattagatgttgctatccaaaaagccatccccacaatgcttttcaaaaatagcgggctaccttccatttttactatattcactaaggagttgctatattcctgcttttctttttaatatttttataaaataaccatatgttcaactattcaaagaacatgtgatcatcgttgattaaaatacgctcaattttcacggcttttttcgtttgatcgtcaatgtcaatgacaactccgctgagcgttgtttttccttcagcgacagtaaaccggactggaaggttcgttttgaatcgcttaataatcgtctctctgtccatccccagtataccgtcatacgggccagtcattcccacatcagtaatatatgccgttcccttcggcaaaatgcggttatccgctgtttgcacgtgtgtatgagttcctactacagccgatgcccgtccatccgtgtaccagccaagtgcgagcttttcacttgtcgcttcggcatgaaagtcgataaaaatgtacggtgttcttttcgcagcttctgcgatcaattcatccgcttttaaaaacgggtcatcaagcggcggcaaaaacgtacgtccctgcaaattaatgactgctagttctttgccgtttgctttcacatatgtgatccctttccccggtgttccttcaggaaagtttgccgggcgaaccaagttcggaacgtcatctataaaatcaaatatttcttttttgtcccatgtatggttccccattgtgattgcatctgcgccggactggattaatctgtgataaattttttccgtcaggccttttccatgtgcggcgttttcaccattaataatggtaaagtgaggcttatattttgtttttagctttggtacatattctttgaccatgtcacggcccggtgaaccgacaacatctccgataaataaaattctcattttgtaaatcctttcttcttgaaaattccttgctgtcaaaaaaataaagtgatgcttagcgcatcactttattttgcatactctacggctcgagtctctctgattactgtcaccttaatatgacctggataatcgagctcgtcctcaattcgcttgcggatatctcgcgccagtcgatgagcctcaagatcattaattgaatccggcttcaccataatacgcacttcgcgtccagcctgaatggcaaatgatttttcaacaccttcgtaggactcagaaatttcttcgagtttttcaagtcttcgaatataattctcgagcgtctcacttcttgcgccaggtcttgcagcggaaagcgcatctgctgcagctaccagcacagcgataatggaagtcggctcctcatccccgtggtgtgatgcaatactgttaatcacgactgggtgctctttatatttggtcgcaagctctaccccgatttcaacgtggcttccttctacttcatggtcaattgctttcccgatgtcgtgaagaagacccgcacgtttagcaagctttgcgtcttcaccaagctccgatgccattagaccggccaagaatgcgacttccatggaatgcttaagcacattttgaccgtagcttgtacggaactttaagcggccgaggatcttgatgagatctgggtggaggccgtgaacgccaacctcaaatgtcgtttgctcacccatctcacgaatatagtcatcgacctcgcggcgagatttttcaaccatttcttcaatccgtgccggatgaatacggccatcctgaacgagtttatcaagagcaattctggctgtctcacgtctgatcggatcaaatccggaaagaatgacagcttcaggtgtatcatcaataatcaggtcaattcctgtcagcgtttcaagcgtacgaatgttacgcccttcccgtccgatgatacgtcctttcatctcatcatttggaagattgacaactgataccgttgtttcggcaacgtggtccgctgcgcagcgctgtaaggcgagtgaaagaatgtttttcgctttcttatccgcctcttctttcgcacggttttcagtttcttttgtcatgatggcgatgtcatgtgaaagctcgttttcaacccgctcaagaatgatttgttttgcttcatcacgagtcagactcgaaattcgttccaactctgactgctgcatacgaatcatctcatccactttgctttccatctcttcaatatgttgttgtcgttcattcagagaatgatctttcttctccaacatcgcttcccgtttatcaattccctcatgtttgcgatcaaggttttcctccttttggagtaaacggttttcttgtttttgaagctcatttcgtctttcacgaacttcctgttcagcatctattcgaagtttgtggatttcatcctttgcttcaagcagagcttcttttttcagtgcttcagcatcacgctttgcatcttcaagaatttgctcggctgcaccgcgtgcgcccgcaattttcgcttcggcaatggttttacgaacaaagtagccaacaactaaaccgagtagaatcagcaaaatggagatgagaaccatcataattggggtcatactttcacctcctcttgctatgaacttggttgttgcttaaaaagtgtcggcatgtacattgtctagttttctcaacatacagaaccttcacagggaatgagtgtgttcatcgcccttgtcaagtttaaatggtttaacaatcatgttaaaaaaacaaatgttacaacttcattgtaaatgtgtcggaaatacttgtcaagcttgccatcttaacgtttgcaggccagtcgtcttttcacgttccgaatgcaattcatccaaaagaagaacgccaatcattcttgattcagaagctggtatattttattgttcacttggcccaatttagcattattttgaatgtttgagaacaaaataacaatggtttgcccagatttactaaagctgttcaagatattgaagccgggcataacaccatggtttgaatagcttccgggatcaacataaaatcccatgccgtatgtggagctgctccctggcgtaaacatcttttcatagcttttttgcgaatacagttttccgtctatcagcgcttggtcaaatttgtacatatctatagcgctcatataaatatcacccgctccatacagctgagatagatcaggtatatacggtgtaactgttttgccgcccttcatcttatacccgacagcaggataaggttctttttcatatgttttgtaaaagcctgcatgcgtcattcccgcaggcttaaaaatatgattctttatgtactgttcatagggctcaccgcttacttcagcaataatataagcgagaacagaatagttggaatcctggtagtcccatacgcccggctgacgtttgattccctgcagttctatgtcttttattaaatcgtccggcgtaatggcgccgtctccttcaatatgtccgtttatccccgatgtatgtgtaagcagattcttcaaagtaatcgtttgtccgttaggaaaatgaggtaaatacgtacttaccggatcacttgtctgaagtttccccttttcctctagctgcaaaatagcagttgcaatcagcgctttttgtgatgaaccgacataaaaagatgtcaatggattattttgaatgtagtgtttacggtcagcatagccaaaacctttatttgttacgatttctccatttctgacaatcatggctgttccgctgaaaccgatttcttctaaataattgctgattttttgatttcgatccactgttttgatttgttcctctgattttttggcagttttctttttgacctcttttttctgatcggtatttgaaaccgctgcagtttcttgagatggttcgttttcttcactattccgatgaagagcattccaaatcgtaatgcaaaccatcactgctaaaagaccaagcaacagttttcctcttttatttagttttctccgtctgtgtttcgcagttcttctgcgggttgggcttgtcattcatttttcctcccaaaataaattccattttgcacacgttttgttagacgaataaagccctaaaaaagttgtcaaaaaaagcaatatttttatcatttttttgcaaaatacaaaaaagctgagtttttcactcagccttttgtatcatttgaaacttattttatttttattcttcaaattcgagttcttcttgtgtctcttcagcttgctgctgcactactccgttattatccaagccgtaatgttcgcgaatttgctcctggatcatcagcatgatatctttattttctttcaggaattgttttgcattttcacggccttggccaagacgctcttcttcataagagtaccatgaaccgcttttttgcacgatatcaagttcagttcctagatcaatgatttcgccttcttttgaaatgccttctccgtacataatgtcaacctcggctgtacggaacggcggagccaccttgtttttcacgactttgattttcgttttgttccccattacgtcgttgccttgtttcagctgttcagcacggcgcacttcaagacgcacggaagagtagaatttcaacgcacggccgccaggagttgtttccgggttcccgaacataacgccgactttttcacgaatttggttaatgaaaatcgcgattgtcttcgatttgttaatggcccctgaaagcttacgaagcgcttgagacattaagcgtgcttgtaaaccgacatgagaatctcccatgtcgccttcaatttccgctttcggaacgagagcggctacagagtcgacaacgacaatgtcaactgccccgcttcgaaccaatgcttccgcaatttcaagcgcctgctcgcctgtgtcaggctgagacagtaaaagctcctcgatgttaacaccgagcttttgcgcgtataccggatctaacgcatgctccgcatcgataaacgcggcttgtccgccctgctgctgaacttcagcaatcgcatgaagcgccacagttgttttacctgagctttcaggaccgtatacttcaataatccgtccgcgaggatatccgccaattcccagtgctgtatcaagagcgagggagccgcttgggacagtagaaattcttgtatctgtcttttctcccagtttcataatggaacctttgccgaactgtttttctatttgtttaagagccatatctaaggctgcctgacgatcactcattctattttttcctcctttatgttaccactacatatactataccctgtttgaagggatttgccaagaaaaaagcgaacgcatattcggattttttcttggcgtgattcctatcaaaatatcataatgtatcagagaaatcatgttttcttaggaggataatgtgctgaaaatattatttttgctctaaaagctttaagattaaatggcagccgtatttagcgccgcgttttctgatctccgttctggagcccgcaaagtgaaactcgtgaacctcttctttaccatttgcggaaatgccgataaacacatgcccaggctcatgcccttcttgagcatcaggtcctgctacaccagtaaagctgatgccgatatcgctgccagtgagtttttgaacacccttagccagttcggatgcgcactccttgctgaccgccccaaaacgatctaatgtttccttcttgacaccaagcacattctgcttcacgtcgtttgtatagcaaacaacgcccccggcaaataattttgaggcaccgctatgatccgtcagccattcagaaaacagccctccggtaaagctttctgccgcagaaattgtaatgcctttttccttgcacgctatagatagctcttttacaagagaagtatcatcgtaaccatagaaaaattcaccgacacgctctaagataacggcctctgtttcttttaacagacgctctgtttccttttcatcggcgtgtttggctgtcagacgcagcgtcacctctccatcagccgccaaaggcgcaattgtcggattggtttgcgcatcaataatatcttccaaatcggcttcaagctgagattcaccgataccgaaaaagcgaagaacggttgacacaattttttcatttgaacccatctttttcagcagaagaggctttgcctcgttttcaaacattgggcgcaattcgctcggcggtccaggaagaagcatataatagcgcgattcatgctctgtgagcattcccggggccattccaaagtgattcgccagcacgtcagaaccttcgatcacaagcgcctgttttcggttattaggtgacatcgtgcgttttgttcgtttgaaatagtcctcaatggattggaatgcctcatcatttaacacaagcggacgtcccagcgtatttgcaatcgtttctttcgtcagatcatcttttgtgggtccaagccctcctgaaaaaataatgaagtcagagcgttcttcagcaatgcggatgacctgcttcagccgctccgggttatctccgaccgctgtatgataaaatacgttgaccccgatttcagcgagctgtttgctgataaattgagcatttgtattggcgatttggccaagcagcagctctgaaccgactgcaattatttctgctttttttggaaattccatgacgaagtccttctttcttagttagatgtttttaacgcttcccagtttttagagaaatattcccagcctgagacgacagtaaagaagacggctacccacagcgccaagtctgcaaacgggaatgacacaagttcaaatggaagattatgaagaagcaatgcggataccgcaataatctgtgcccaggttttgattttaccaagcatgttagcagctacgacttctcctgttccggctaagacaagccttaaacctgtcacggcaaactccctgctgataatcacaatgaccatccaagctggagcgagatcaaattgaacaaggataattaacgctgcggataccagcagtttgtccgcaagcggatcaagaaatttcccgaagtttgttacgagattcaattttcgggcataatacccgtccacccagtctgttgtagatgcaataataaatagaatggcccccgccaaatgtgcgaccgggatcgattcgtctccaacttcgagcctgccccagtcaaacggcgccagcatgataatcatgaagattgggattaatgcgattctagctagtgtgattttatttggtaagttaaacataaagcccctccaatttcatactcggacgtgaagaaaagtcatctggtaattaagatgacttttcttcctttttatttacaatctttatagtttgtgccatcacttttttcggatcaagttcatatgaaagaaccttaccgttgatttttattttcagattaggtgcatatccggtgcggatatcaacttgtttctgatcagttatgtcttttttataggtctcgtcttttttcagcgttccttcttttaaagagctgctgttttcatcgcgcactcgaatccaggagctgtctgatgccttcagttccagctcgattttatcagcgccggacacttcataagtcgttaacgatccttcagtgccagcagctttaatctccagcttatcactgtcattttcttttttcttatcttcgttttctttcgtttcttttttagtgtctgtctctttttcagagctgttattttgattctctttcagcgttgaatctttagggatttcgtacttgctctcactttgcgtaattgctttttctgatgccgcattgtgatcatcactgtttttgtgattggcaaactgaatgatcgcgtacacaatggcaatcacgacaatcacgccgagaataacaagtatcgttggcagcagctccagcgccttagatgctggcttcggcatttccttttgaagattcatgccggagatcttttcagacacatcgtcatgatacgtattagggatatcttttttatgctcctcaaacagctgatccgcatcaagcccaacggcttctgcatattgcttgatgaatgcccgaacataaaacttccccggaataatgtcatagtttccttcctccaaggcggttaaataccttttttgaatctttgttgccgcttggagatcatccaatgacattgctttttcctctctggcttctttgagccggattcctagttcagtcacaacaaacaccttccaattttaaaaatcaaagcttgaaaacccggattgatcaaacatttggggttcctcggcatgttcatatgtaataacctcatcagggtcatttctcagttcaataatataatcaaagtcatctagtgtatactctgtattttgaacgaatatgtccggatgctccaccacttttgttgcaggcagccgcatgatttctcggaccagctggagatggcgttccgatcctcttcgtgttgacacaattccgtcaacgataaagacattttcagtgctgtattcatcggcaatcagctggcttcttatcgtctgcttcagcaaggttgatgacacaaacagccaccttttgcttgcacacacactagaggctacaatcgattccgttttcccgacacgcggcatacctctgattccgattaatttatggccttcttttttgaacaattcggccataaaatcgactaataagccaagctcgtcccgttcaaagcggaacgttttcttgtcatcggcatcccgttgaatataacggccgtggcgtacggcaagtcggtcgcgaagcctcggttctctaagcttcgttactttaattgtttccatcgtttttaagattgattctaatcgtttaatttgatctatatggcggcacctgagaagcattccccttctggaaagatcgacgccgtttatcgttacgatgttgatagaaagcatcccaagaagagatgaaatatccccgagcagtccggggcggttcacttgaatttcatattcaaaataccattcgagctttgccaaatgatatacccccttcattgtggcaaaattttaccttcctttatcataaagcatttttctctaattagaaagaagaatgttgctgtgatgaggaaaacataaaaaagagaggaaaaatcccctctcttcctagtgagtgctgttattttcaacaagcttaaccatcatattggcaatggcgtgctgttcatcttttgatgctacactccaaagatctgccagcactttttcctgctcgttcttagattccacttcattagccaagtagctgccgatttctgtcgcaagatctgtaatcgtatcctggctcatacctttatcttgcgcatagttcagacggtcgccaaggaagtttttccagctatcccagttttctaatactgacatgcttgtttcctccatttcatgtgaagttacaagattattgtgtccttcacaaaagaaactatacaccgaatattttcgtgtcaacagtgccagccgccattcaccgacagaatttggccggtgatatatgacgctttttcagacaggagaaaagctgttgcatcagcaatttcttgcggccgggccagccggccgatcggaatctcatcagcgatctcttctttttcagccggggtaaattgattcatcatatttgtatcaactgcacctggcgctactgcgtttaccctgattccgcttggtgccagctccttagccaatccttttacaaatgaatgctgagctccttttgccatgctgtacagtacttcacaggatgctccagtctctccccaaatcgagctgacagccacaatcgctcccgatttattccgaatcatgcctggcagaaggtttctcgtcagcatatacggacttgccacatgaagctgaaccatttcctgaaccgttgcgttatctacatccgtaatcagcccaaaatggcttcgtccgctgtttaaaacaatcgcatcaatcggctgaacaattgaacttgtcagcttatctgctccatcttgcgcagacagatcagcttgtaatatctccgcatttacgccaaacatctgacttagtttttcagcaagctccgctgccgcgtattgatttgtattgtaatgcagcagcagattgtatcccttagccgcaagggtttcgctgatgcttttgccaatgccgccgcttgctccggtgattagtgctgttttgttcatcctctttccttctttccgcagaaaaacacccctcacactggagggatgttttatttatgatttaggaacaaccttgcagacagtcagcctgtctgcagcgatttcctcttgtattacgttctggacatcctcaagggtaatctgctcgagtaccgttacaacgtcaaacaggctcatatccaagaacgcataacgggtaaattgattggcgatgtattcaggggaattcagcgcttttaagaatgtaccaatctttttctttctggcaagttcaatcttttcagcagtaaccagttcaccggcgcgcaaaagcatgcttgaaatgtcttcagccaattgatcaggctcaggcgtatctccgccgatcgccgcaaaaccaaacccatattcagcagtaaaatcaaagctaaacgtttcgtcaatatatcctttttcataaagtgattcatactgggcagagcttttgccaaaaagagcttcaagcaataagttcattgaaagttcatgctttaagagctctttgcctaatttaaacggatttttggatttcagcccaacaaggcatttcggtccctgcacgttcattttgatctctttttcttttcggaaaaccgcttcttgctctttcacttcttcccgtttgatctccggctgatcagtatacggctttttcccctggttttctcttacctgagaaataatcgcttcaggatctacaggtccgacaatgaaaaggagcatgttactcgggtgataaaacgtttcatagcattcataaagaaggtcttttgtaatatgtgaaatgctttccactgttcccgctatgtcaattctgacaggatgctctttgtacatgttttcaatgaccccgaagtaaagcctccaatcagggttatcgtcgtacatattaatctcttgcccgataatccctttttccttttcaaccgttttttcagtaaaatatgggtcctgtacgaaatcgataagcgtctctaaattgcgttcaacatttgatgtgcttgagaaaaggtaagccgttcttgtaaatgacgtaaacgcattggcagaagccccctgtttgctgaaatcttgaaaaacgtctccgtccgctttctcaaacagcttgtgctcaagaaagtgagcaatcccgtccggcacgtgaaccatctcgtttttacctaaagggacaaaccggttatctatcgagccgtactttgttgtaaagaccgcatatgtcttgttgaagccttttttcggcaaaacgtaaacatcaaggccgttggacattttttcatgatacagcgtctcctgaagctgttcatattcgattggtttgatcaagatgcaccctccgtcccttttaagaaataagtcgtatcaagctgaatcttttcgccggctttaatgatatcctcttttgtgacattctcaatattggcaagaaagtcttcgataggaatctcgacttgagcagcggcctgctgatataaaaactcagataaaccgtatgctgtatcaatcgtttccagcacttgatttcgaatgacagcctttgtctgtgctatatcctgctcactgaaatcgccatttttcattgcctggaattgctcagcaataatcgaaaccgcctgttcataatttttcacttcaatgcctgacatcaccattaacaagcctataaaactttctatacgcgaagccgcgtagtaagcaagactggctttttcccgaacattaatgaaaagtttagaatgagagaatccgccgaacaatccgttaaacacttgtaaagcaggataatcctgatctgtataagtgatgctggtgcggtagccgatattcagttttccttgcttgacatcctcttcatcaattacttcttttggctgaactttttcatcagcgtgattgttttcaatcgtgccaagagtgcgctcttctgttttgaaatacttatcaattgccgaatgtacctggttactgtccacatcgccaactacatataaatcaagctggtctttttggatagcgctttggtatgtttcgtataattgctctgccgtaatgtcatcgacatcgtcgatttcaccattgacatgaagcgcgtaaggctcatttttgcacatttcctgtatcagccttaaattcgaatagcgcattttatcatcatagacggcttggattctttgcttaagcgtccgtttttcttgagccacatattgtgactgaaaagcgtccccctctaaagcaggtgaaaagacgatttctgcaagaagctggagccctttctcaagtagcggcgattggtcttttaaatatttttcatttgggatttcaagcctgaacgtaatgacgtgccgctctccttttttcgtaagatcagccgatactgacgtgccgtacagctcatccaggtatgaacgcaattctgcggttttcggatggcttttcgttccgcgaagaagcacatgcgggagcagcgctctttttgtgacttggtcctttgtcagcggcgcaagcatcttaaaaataagcgagacggttttgaatttttctgtttctacaatgtgtgcggttaaaccgccgtgctttgatttgagttcattaacatatgacatatggaacctccttcgttcatttcttaattagtatgtattatgaccaattttcagcatccgcagaaacactctttcatgtaattatagcaactgtaggatttataaggaaacaataacctccgcatgctgtataggtacagttgtaaactgtgcaaggaagcgcaaaaaaagacggctggctagaccgtccctaagtttttttcttcttcttcactttttttagcatctacagtaaagagcactaaaaataaagaaacgatgctgcaaaacgccgagagtatgaaaataatccagtttgcattagacattaatgcagcaaaaacaggtggaccgagagctactcctataaagcgcatgctattgtagaaggaggaaatggttccgcattgttcactttcaatcccttcggttatcaatgcatctaaagcaggaagagccattccaatcccaatcccgccaaagcttaaaaagacaaataaaaaataaaaactgtggttccaccacaaggcaataaacgaaagggttaacagaatcattcctgtaacaacgcaaaatttcattcggcctttatctttaccgatctttttgccagctataaaagaactggttgacaaaaacaaaagtgggattgccagtaatccgcctttagctactccgtcaatagcatacttgttctccagcgtatctgataaataaaataatacgccaaataacaaaaacataatgacacacccgataatgaagaccgtataaagccagcgaccatcctgtttaaagattttcttcacactcttaataaactcagaaacagcaggcgcatcttcatcttcttcaggcttggccaccaaaaacaatacgagcaaaaagctgatcaaacagaaaaacggaataaaccaaaatggtacaaaccaataccaagaagccagtaaggctccaagtatgggactcagtaccttccctgacgtgttagcggtttcaatatcgccaagacccgcgctgaccttttcatcgtctcctttaaacaggtcgccgataaacggcatgacaattggagcggcacctgcagaaccaatgccttgaagaacccgccccgccaagatcatagcataaggatttttcatataggtcgaggcaaaagcagctacggctccccccaatcctgcaatgaggaggcatggaagcaatattttttttctcccgaaacgatccgacaaatatccggcaatcggaatgcaaataattgctactactgaatatacagtaatgattaaagatacttgaaatgaagtcacagacagctttttctccatcatcggaagaacaggaatcagcatggagttcccgagtgtcatcacaagcgggacagaagacaatgcaataatatttttcattccatttttctctctcaacattttcacccattcactttcttgtcatcccttatatattgcgttaaccggaatgaaagtatgtacaaagaaacatgaatcagtgcaaataaaaaaacagacacatacaggcgtccgtttttagaatcgtttacgcaaaacatgaaatctgaatttatccgctctaaaataatttaaagaataaagcaccggtttatcgtgctgatcgtaatgggtttgttttaacagcaaaagagctgtttccggatcgcattcaagcactggagaaatggtatcgtgatagccgatcggttctatatcagttactgcatagctgattacggagcctgaatttttctcaagcaggtcaaacatagattcttgctgatgagaaaaagaattcggcaaaatattcatcggaattttgtctatacaatacacaatcggctgtccgtcagctgtcctgactcgttcaaggtaaaaaagttcttgcccttctgccaaatgaaatctcttcgtatcatcttcagacggcataagcacttgtgatgatagaaaaatcgtgccaggggtcatattcgcctgttctatcatcttggttacactgttcagctgttcaatgcccgaaagaaataacggcttagaatggacaaaagtgcctacaccatgccttctgataatcacatgctcttcttccagtatccgcaaggcttctcttagcgtcgctctgctgacaccaagctttttggaaagctcaaattcagaaggcagcttttccttctcagtgtagatcccattttttatatcctctttaattcgttcaattactttcaaatacaagtgccgattatcagcttttgtagacatgtttcccctccgtaaaccactttcgataaaaattattgaacaattgggacaactatatcatgttttgtcgaaaaaataaatagaaaggtgatcagtttacataatgttattattgacaactatagaaagcggaactcccttcattaagaagagagctcatcatatttctcttttgataataatacttccctaggtttgctgccttcatacggtccgacaacaccgcgttcctccattgcgtcaatcaggcgcgccgctctcgtatagccgattctgaatcttctttgcagcattgaaacagatgccgtctgcatgccgacgattaattcaacagcttcatcataaagttcatcagtaacctcggaatgagtttccgtcgtctcctcaggaatcatttcttcttgatattgcgctttctgctgcgtaatcacatggtcgacgaccttctccacttcgtcatccgacaaaaatgctccctgcacacggacaggtttgttagcccctacaggtaaaaacagcatatcgccgcggccaagaagcttctcagcgccacccatgtcaagaatggtccttgaatccgtctgtgaagatacgctgaacgcgattcgtgacggaatgttcgctttgatcacccctgtgataacatccaccgatggccgctgtgtcgcaataataagatggatgccggcagcccgcgccatttgggacaatctcgtaatcgaatcttccacatcagatgaagcgaccatcatgagatcggctagctcgtccacaatgacaacaatataaggcagctctggctgtttcgctccttcttcattgttggcgcgttttatataatcattgtatccttcaatatttcttgtacccgtatgagaaaataattcgtaccgccgctccatttcattgacaacctttttcaaagcctgcgacgcttttttcggatcggttacaacaggagcaagcaaatgcggaatcccgttgtagacatttagctctaccattttaggatcgatcatcatcattttcacttcatgcggtttcgcccgcattaaaatacttgtaataatgccgttgacacagacacttttcccgctaccggttgcgcctgcgaccaaaaggtggggcatcttgtttaactcagccaatacagcttcacctgaaatattgcggccgagtccaattaacagcttcgcatccggtctgtcattcaatttagactccagcacttctttcagcgaaaccattgccacttctgcgtttggaacttcaattccgattgctgatttgcctggtataggcgcttcgatcctgatatccttcgcagcaagcgcaagcgctaaatcatcgcttaaattgacaattttgctaaccttcactccgacatcaggatatacttcatattttgttacggccggtccgagatgaacctgtgtgactttcgcctttacgccaaagctttggaatgtgcgttcaagctttctcgcattttcataaatattctttttatcagcctgctggccggtatgcttcggatctgccagcaaatccagtgacggcatctcgtaatccttattttcgagctctgtaaaggtcataggaggagcagaaacagtttcctgatcacctgtctccggttggatgtcctgaagcggcttcgacacaggttcggcgcgcttttctataactggagactcttcctcttcattacgatcagaaaagcttgagataatcggctctgaatgaataagagacgatactgtttcataatccccctcttcatcaggaggctccggttccatttgctgttttttgcgggccggtttttgttttttgctcggtgctttcgtttttttcgatgactgcatatttgatttgaaggatttcatatcatcaataaatgctaaccattgctcttttataaaacgtccaatcgggctcatccacttttttagtgtttcttgcagtgagcgtcctgtgactaagatcattccgatcaaaatcatgacaatcgccatgatctgagaaccagtcgacgcaaacaaaaagtgtgaagccgcaaacagcagcgcaccgatcatccctccgcctaaatcaggtgaagcagagctgccattcatgtccattaaaaacaattcccacgtattgcgcaccacgcttgcggactcaatagaccctttgtgcgtcaaatttttaaatagctgcacatgagaaagcagcaatatgcttgcgatgatacagtacaacccggcctttcgtctcgttaaaaggcttggggttttcttcttccaaaacagcgagactcctaacgccaataaacctaacaagcataaaataaaccactctccagcaaaaaagcggaacaaatagataaacgtttgcccgactacccccagctgcaagattgcgataattgaaatggctatacacagcaatccgttgagctcgtattttatattgagctgtttcgcctgtttttttcttgattttcgttttttctttgccacactcatcaccttactgcgttaaaaaatgtaagttcatacataatgaagaaagcagccgtttacaggctgcgttttttctgtaggattcccctattatagcatattttgcccttaaaaaagggttggattcttatacgtttaatttcagcttttgtcccggtgaaatgtccggatgcagaaaatgcattggattggtgctcatgatttgaatgacttccgcttcattccctttcatttcgactagaagcggtacacctttatattcaatttgctcatgtgcgcttgtctcttggttctgttctgcaaacacaatttcctgcggcatcacggtataaagaatcattgaatcatccgtccttcttctttccttgcttcatcgatgagctcattcagtttattgattgcctgtccgacaccgcctgcgtgatcgatcaatccgtatttaactgcatccttaccgactacatttgttccgatatcacgtgttaagtttccttttgaaaacattagctctttaaacttctcttcggttatattggaatggcttgtcacaaatttaacaactctttcttgcatcttatccaggtattcaaacgtttgcggcaccccgatgaccagcccggtgagcctaactggatgaatcgtcatcgttgctgtttcggcgatatagctgtaatcacaggatacagcaatcggaacgccgattgaatgccccccgccaagcacgatagaaacggtcggtttcgataaagatgcaagcatttccgctatggcaagaccagcttcaacatctcctccgacagtatttaatatgatcagcaagccttcaattttgggattttgttcaattgccacaatctgcgggatgacatgttcatattttgttgttttgttttgcggaggaagctgaacatggccttcaatttgtccgataatggtcagacaatgaatatttgtatcttggggcagctgaggaagcgtcgtttcaccaagctgctgtattttattcataatgctgtccttcgcatcatttttttcaggacgctcttcttctgtgttttccatacgatgatccatctcgctttcatcctttccgagtttctctttgtattatgaacaaagatacttcattcaatcccggcttgaaggacaaaaaataaagaccggagcagctccggcctttagtcagtcattatacttccataataattgggatgatcatcggtttacgtttcgttttttcataaaggaattggttcaaagcatcccgcattgcctgcttcagcgttgaccattcgacatttgatgtttcagtcgcttctgtcacgatagaccggacaagctcagtagcctgtacgataagaccttcagactctcttacataaacaaagccgcgagtgataatttctggtcctgatacaagatgtttcttttgtttatcaagtgtaatgacaacgattaaaattccgtcctgtgaaagcaagcggcggtctctcaatacgatattgccgatatcaccgacacctaaaccatcaattaaaatattgccgtaaggaactttatccccaatttttacgttttggccgcggaattcaacaacgtctcctttttcaattaagaagatgtcactgcgcttcatgccggtttcttcagcgatttttgaatgagctttttgcattctgtattcgccgtttacaggaatcaaatattttggtttaagcaggttgatcatcagctttaactcttcttgtgagccgtggcctgatacatgaacacgcttttgggcaaagatgacttgtgcaccggctcttgcaagaagatctactgttttagagtaaatgagttcctgcccgggaatcggagttgacgcaatgaccaccgtatccccttcttcaatgttcagctgtttgtgagctttgtttgccattcttgtcaaagcagctaatggttcaccttggcttccggctgtaataatggccacttcgcgcttcggatattttttgacatcctgtacagaaataaacaattcatcatctgcttcaatgtatcctaactttctcgcgagctgcaggacagattgaagattttttccggctacggcaatctttctgccattttgagccgctgcatgaatgacttgctgaatccggttaatattggatgcgaaaacagcaataatcacccggttctgtgaattatacagcgcatccgaaatttctccgctgacagccgcttctgaaggggtgtaacccggccgttccgcatttgcactgtcagaaagcagagcgagcacgccgctattgccgatcttggcgatctcgccaatgtcgcacgtctgattaagtgcaggtgtttggtcaaatttgaagtctcccgtgcatacaatagatccaagtgatgttttaaagctcacacctacagaatcaggaatgctgtgaatcgttctaaagaacgatacttttgttgattcaaatgtaatgacagatttggagtgaatttctcttaaatcagtttttcggttatgtccatattgttttaatttctctcttaacagtgcaagcgtcagttttgttccgtacactggaacggacagcttgtttaataagtaaaaaacgccgccgatattttcatcgtgcccgtgcgttaaaaagattgccttgacgcggtcagcccgttcaatcaaatatgatatgtcaggaatcactacatcaataccgagcatttcgttttctggatgcataaggccggcatcaacgacaaatatgtctgagtcaatttcaatgacataaaggttcttcccaatctctccgacaccgccaagggcgataattctaacgttttctgtatttttctttttcaaaatctatatcctcctagtctcatacccgtccatcatcacttgttcctattataactgaaagtaaatttagaaaacaagataaagcagaaggtttagggaaaaccaatatgtaaaagaaacggtcaaactcagctgaatgtgagaatgaccgcgtttgtttcactgtatgaaattttcttacagttcgctgatcgtgctgcttaagctcagacgttcatcctcagttaacgggactagaggcagacgcacagaaccgacatcaagacctctcagctgaagcgctgttttgactggagcaggattaggcgctttaaacagttccttcataatcggcagcagtttctgatggatcagtgccgcattagctgtttgcccattcgtataatttttgatcatttgctgcatatcagtgcctgcaatatggctcgccactgatacaactcctcttcctccaactgaaagaattggaagcgtcagagcgtcatcccctgaatagacatagaagtcttcaggtgtttcagcaataatttttgtaatcgcttcgaggtctccgctcgcttctttaatcgcaaccacattcggaatgtctgccgccaaacggatcgtcgtttcaggagcaagagaagcaaccgtacggccaggaacattatagagcataaccggaagagatgtctctgccgcaattgctttaaaatgctggtacattccttcttgagaaggtttattgtaatacggggtaacaagcataacagcgtccacgcccgcttcctcagctttttttgtcagcttaatggaatctttcgtgttgttgcttccagtaccagcgataacgggcacccgtccgtttacttcttttaccgtatattcaaaaagcgcaattttttcttcagttgaaagggtcggagattctccagttgttcccgctactactaaagaatccgttccgtttttcaacaagtaatcaatcagtgtagacagtttttgaaagtctacgttccctttattgtcaaagggtgtaatcatcgctgtagacacatttccgaaattcattttattcacctcatcatgattcaatcacatttacttcgaaagttcaaacacttcatgcaaagcgtttacagcaggaaccatatccgcttcatggacgagcacccatatcgtcgtatggctgtcagccgactgaaggatcggaatttctttttctgaaagagccgatacaattttggacgtaacaccgggaacacccataatgcccgcgccgaccgccgataccttcgcgcagtttctcgtcaccattggatcatagcccatatccattaaaatacgctgagctgtttctgttttatttccggctaccgtatagacgatttcactaggtgtaatgttaaagaaatcgacactgattccagcatttgccatagccttgaacacttcagtctgaacgttatactggccgattttcgcaggcactttgaactgcgtgacatctttgacatgggcgattcccgtaatcagcctttcaaaaacatcactgccgaccttggaagagtgatgtgatgtcaccaatgtacctttatcattcgaataagtcgaacggacgcggatcggaaccttggcctgcattgcgatttccaccgcacgcggatgaatgaccttggccccctgatacgccaggttgcagatttctgtatacgtcacaacaggaagcggttttgcattttccaccactcttgggtcagcagtcatcacgccttctacatcggtgaaaatatcgatgtattccgcatcaacagctgctccgagtgcggctgcagacgtatcgctgccccctctgccgattgttgttgtatcacccttttcagttgcgccctggaagcctgcgacgactaccgcatcatgattggcgagcacactgaataaacgctccggtttcatttcaatgattttcgcattggtatgctgatcattcgttaaaaagccagcctgagcccctgtcagcgcagctgctttcacaccgttatcaagcagcatgcttgtaaagacgacagaggaaatagtctctccgcaagataaaagcaaatcctgctccctaggagaaatcgctgactgatcgccgtaaagcagcccgagcaaagaatctgttgcatacgggtctccttttcggcccatcgctgaaacgacaacgacaaccttatatccttcactgattgcttctttaatatgccctaaagccagtttgcggcctttatcatcttttactgatgttccgccgaacttttgaacaattatcttcactgttttcactccaaattattcggacgtaacagaagagagcaggctgatagcgccttactctcttctattcgtctttagaaaattctctcttttatacgaggtttagttttttcaggctttctgcaatttgaacagagttccatgccgcgccttttaataggttatcagaaacaacccataaatgaaaaccgtttgctctgtccaagtctttgcggatgcggcctacaaacacgtcgtttttgccgacagcatcagcaggcatcggataaagctgctggcttggatcatcctgaagtgtcacgcccggagcttcttgcaatagatttttaatatcttcaactgtagcgtcatcacggtctatttcgatgtagacggactctgagtgtccagtttggattggcagtctcacacatgtagccgctacttgaaggtcaggcatgtgcatgatttttttcgtttcatttatcattttcatttcctcaaacgtatagccgttatcttggaatttatcaatttgcggaatcgcgttgaaggcgatttgatagtgttttttgtcaccttttacaggcatgatctcaggctctatttcttctttatttaaaatcgcctgtgtttggctgtaaagctcttttacagcttcattacccgctcctgatactgcctggtaagttgatacgatgactttgtttaagccatatgctttgcggatcggttcaagtgccgcaaccatttggattgtagagcagtttggattggcaataatgccattgtgttcatgcaagtctgcctcattcacttctggcacaacaagcggtgtattttcatccatgcggaacgcgctcgtattatctataacaatagcgccgcgttttacagcttctggtgccaatgcttgtgatacgcttccgccggcgctgaacaaagcaatatttaccccttcaaagctctcaggagaagcttcctgaacagtcagctctcggcctttaaacgtgacttttgtccccgcagagcgttttgaagatagcaatgtaagtgtgtccatttcaaagtttctgtcttcaagtgttttaagcatttgttgtcccacagcccctgtcgctccgacaacagctacgtgtaaacctcttcccatctgtaaaactccttccgccaatcagcttcattgaattgatttgactatgattttacgttttattttaccatagaatatgcaggtgatgaccgaattttttagtttgggaaagattttctgtaaatttagtcatttccctgataattctcaactagaatcggctgaagctgctggtgcatgagtgccttttcaatcgtttgcggtagcagatccattttggctaccattgaattcggttttttaaagggatcgtcttgcccgaatggaataaaaaagatattttttgttgacatgagcctcattaaatttgttccgtttaaaccaagagcatcatttgtcgagatacccagaacgacaggccgattgtttcggattgtcgcttttgccgccatcagcaccgggctgtccgtcatggcatttgccagcttgctcattgaattgcctgttaaaggcgcaatgaccatgcagtcaaggggcagcttcggcccaagaggttctgcctttacaatcgaatcaatggcctcatatccagtcaggtcttcaatttttttaacccattctgcgccctctccaaatcgggtatttgtggattttacattaaatgtgacaaccggacggacttcagctccttcattgaccaacgcctcaatttgcgggaaaaccgcttcatatgtgcaatgcgacccggtcagcccaaacccgattctttttccttttaatgacgacatccttatttcccctcctcagcttgtatttcagccaaaagcttgctcaagacgtttgcaaggatttgcccagctgttttaggagcgacaatccctggaagcccgggagcaagaagtgctttaatcccttgtttctcggcatatttaaaatccgttcccccgggacgtgaggccagatccaatattaaggtttttggtgtcatgctagaaagtaccgtttgatttaaaatcatactcggtatggtattaatgcaaatatctatatcttttacatgctctttcagctcatcggtatgaaaaggaacgagccccatttcagtgatacgtgccagatgcgctgaacttcttgcccccacttttacattcgccccgagcgcggcaaatgtacgggcaatcgtcatcccggtgcgccccagaccgagaacggccacctgtgatccgtgtatcgtataatccgtgtgctgaatagccagcatgatcgttccttctacagtcggaatagagttgtatatcgcaatgtcatcccgctcaaacagtttaacaagttttctttttgcctgagctgcaatgttttctaaataggcgttagaaattcctgagaaaatgacacaatgtgcaggcgttctgtcgagatggtcctgttttaacacaacttcttcattagaaaatacagtcgatacgacaccttctcctgttgtcgcggatactggaagaatgatgctgtctatttgctgaaaaggaatttcatcaatattgcattttactgccccggtaaaaccgtgatccaattggtcaaaaccgacaagatagatgtcagcctgctgttcagtgagctttcttataatttcgagctgtcttgcgtcaccgccgataactgcaattttcaatccggttaacattctaaacgttcaccttctttgtatatactggatctctagttgttaagctccccttcatcttatgatcaaaagaaaatactggtgaatataaaagatgcgctttttccatataaaaaaacatcggctccggcagccgatgtttcagatgttttctttagagcccgcttcacagtcaattgggctatttactcttgtcgaggaggcatttcctcaggtacatctaatataatcatatctgaaccgatcttttgaatatggtgccatgggacacgaatgtcatgaccttgctttctcaaaccaaaccacttaactgtgggaatgaggagtgctgtaatctgtccatcctgttcattgatttccaaatcggtctggccgagcactccgagccgttcagctcttttgatgtctacaatttcctttcctgataattcactgagccgcatgtctgtcacccccttgtactatgtatgatgaaagggattaaaaaatgcctgctccattatggagcaggctttcctttttaagacggcatattgccggaagggctgataagtgctaatgcatagtcttcggtaaacaattgtctggcaaggccgttaacacgctctaagttcacggcgtttaattcattgatgatttcatctaatgttttatgtttgccgagcagcagttcattttttccgtttcggctcattttgctgtttgtgctttctaagctcagcattaagcttcccttcatttgctctttgctgttttccagttcttttgaggtaatgccgtcacgttttaatgtggcaagggtttcttgaattgtttccgacagctgctgaagctgatttgcacccgttccaccgtaaatagtgagcattccgctgtcctcatatgagctgtgatagctgtaaacagaataagcaagtcctttatcttcacgcacatcttggaacagccggctgctcatgctgcctccgagcacattgttgaggacgattaaatcataaatacgttcatggccaacctctaagcctttaaatccaaggcacaaatgagcctgctctgtttctttttttctcgtcagtttttccgtgtggaactcaggcttctcaaggcctgtcgctttgcctttcgcctcgtatgacccgaaccatttttctacatctttgataaaactgtcagatatattgcccgctaccgaaatcaccactcggtccggcgtataataatcatgcatgtattgtctgagagagtcaccgttaaaggaagcaagcgtttcttccgtgcctagaattgggtagcctaaagaatgattgccgtaagtggctttgctcaataaatcatgtacaatgtcgtccggcgcatcttcatacattttaatttcttcatatactacatttttctcttttttcagctcgttttcatcaaacgttgaatgaaagaacatatctgctaatacgtccagcgcgtaattcgcatgctcgtcaagcacctttgcatagtagcaggtatattcctttgaagtaaacgcattgacctggccgccaatacgatcaaaagattctgctatctcgcgtgcagattttgtgctcgtccctttaaagaacatgtgctctaaaaagtgagaaattccgtttatctccggcgtttcatgtctcgaacctgtgccgatccatacgccgatcgcaacagaacggactgtcgggttattttccagcacaattcttacaccattttgacacgtatatcgtttaatcaaatttgttcctcctattcgaagacaagctgccttcatctgttacttcaatagtcttgtttcatccattagttcagtgactgttccaagcgcatatcctttgtcttttatctgtgtaatcagcgcttcaagactttccgccgtaggggcagtcggatgcattaaaatcatggcaccattatgtatcttgcttaacactctcgtctgaagtacagacggagccggcttttgccaatcgattgtatcaactgtccacatgactgttcccatctgtttctctgctgcaatgtcgataaccgcttttctgaaacttccgcttggcggagcgaaccactttggcttaacgccgatcgtttgttctatttgttcattagtcttgtcgagctgctcggaaattcttcctgtagtcagtttgctcatatccggatgattgtatgaatgatttccgatttcatgtccgtcttttgcaatcttcttagcgagcttttcattgtttctcacccaattgccttctaaaaagaacgtagctttaacctggtgcttttgcagaatagggagcattttttccaaatactcatttccccatgccacattgattaaaaaagccaccatcggtttgtcaggatttcctttataaataggctcaggctgaagtgactcaagatgaacacttggttttacttgactgtacaccaaatctttttcccgaaactcaccatgctttttcatttttttatatgattgttcaatattgacctttaatccattgtagcctggaatgcttttccatactttatcaattcttgcattctggggcttaacttcgtactccggcgctttttgaagcaattcttcatataattggtcttttgacgccgtgacagtcaccgtatcttttttcattgcccctatataatcaagtgcatgcggattttccatcatctcaaatgagacaaaaaaaagaaataaaaaaacggcaaacggtacaaattttttgtacatgttctgtcccccctcacctcaaattatgaaggagaaggacaaggtagaacccgcctgcttttgaaaagcttcaaaataaagaagccgggtctcccaggctccttttatgttttcttttaagattgttgttcttctttttctttctcttcacggagcaccgctttgcgggataaattcactcgtccttgtttatcaatttcagtgactttgacaagaatctcgtctccgatttttacaacatcttcaactttccctacgcgttcaagcgcaagctctgaaatgtgcaccaaaccgtcttttccgctgaaaatttcaacgaaagccccgaatttttcaatccgtttcactttacctaggtaaagttggccgacttcaacctctctaacaaggtcttcgatgatttttttcgctttttggttgccgctttcatctgtagaggaaataaagattgtgccgtcctgctcaatatcaattttaacaccggtttcttcgatgatcttattgatttgttttccgcttggtccgatgacatcgcggattttatcaggattaatggtcattgttaagatcttaggcgcatatcgagaaagctcttttcttgattcgcttaatgttgcaagcatgctgttgaggatttccattctgccctttttcgcctgctgaagcgcttcttcaagaatctctctggaaaggccttcaattttaatgtccatttgcagggccgttacgcctttttcagttcccgctactttaaagtccatatctccgagcgcatcttccatgccttggatgtcagtcaagacagtgtaatgttcgcctgatttgacaagacccatcgcaataccagcaactggcgctttaatcggtacaccagcatccatcattgcaagtgtgcttgcgcaaatgcttgcttgagatgtagaaccgtttgattcaagcacttctgaaacaagacggacagtataagggaagtctttttcagacggaataactggctcaagcgcacgctcacccagtgctccgtgtccgatttcacgacgtcccggtccgcgcatcggtcctgtttccccaacgctgaattgcgggaagttgtaatgatgcataaaccgtttcgactcttcgacacctaagccgtcaaggatctgcacatctcccagagcacctagcgtacatacgctgagggcctgagtttgtccccttgtaaatagacctgaaccgtgcgttcttggcaagaggccaacctctgaagagagcgggcggatttgatcgacaccgcggccatccggtcttactttctcttcagtaatcaggcggcgaacttcatttttcaccagcttggataaaatctgcttcacttgcttgattgtgtcttcatcatgttcttcatcctcgaattttgccacaactgcgttcttcacttcgttaatggcatcttcacgggcatgcttttcatgaacttggatggctttcagcagatcctcttctgccaaagcttttactttttcattaagctcttcatcaatttcaaagagcttaatttcagatttctctttgccgactgctgcaacaatttcttcttggaatgcaatcaggcgtttaatctcttcatggccgaacataatggcctcaagcatgatttcctcaggaacttcgtccgctcccgcttctaccatgttaatcgcatctttcgtgccggcaacgacaagattgatgtcgcttttttcaagctgatcgactgtcgggttaatgataaattgatcatcaatgcgtccgacagtaacccctgcaatcggtccttcaaacggaatatccgatacagaaagtgcaagagatgaaccgaacatggcagccatttctgaagagcagttttggtcaacactcatgacaatgctgatgacttgaacttcattacggaatccatcggcaaacaaaggacggatcggacggtcaattaaacggctggcaagaaccgctttttcacttggacgtccttctcttttaataaatccgcccggaattttccctaccgcatataatctttcttcatagtttacagtaagagggaagaaatcaagcggtttaggttcttttgaagcggttgctgtactaagtactgctgtatcaccgtagcggatcatcacagcaccatttgcctgtttggcaagctggccggtttcaacagtaagcgttcttccggcccaatctatggtaaagacatgtttttcttgtcccatacaattacgaactcctctcttcgttgtgtgaaataatcaattactcctattatgaacgaaatgaattgaacatatcaatgtcaaagtagtatgtaaaaggatttcaatgatttgttataagaaatttcgctttaatacgataaaaaagcgggaatcctcccgctttttacgattatcgacgtaagcctagtttgttaattaactcacggtaacgagttacgtctttattacgcagatacgtaagaagattacgacgcttacctaccattttaagaagaccgcgacgtgagtggtggtctttcttgtgagtacgtaaatgctcgttcaagttgttaattgagtcagttaggatagcgatctgaacttctggagatccagtatcagattcgtgtgttttgaactcattgatgagttggtttttacgctcttgagtaattgccatcctgtttcacctccaaatcatatttagccccagttacctagcaaccgtcggtgacttcggattgccaagcaatggttttaagactacgaaaactatcatactaaaaatcgtgcctatatgcaaatattttagaataaaatttgcgtgcgttgcaagttatttccgcaaattgctgaaataacggatggcttcctgcttatctttctcaatttgctctgttaattctttgataccattgaatttccgctcgctccgaatccgtttgtaccattcgatttttatagcggctccatatacctcttgatcgaaatcaaacagattgacctcgatggaaggctgctcagggcgcttttcataaaacgtcggcttatagccaatattgcaaacgccattgtaaacttcgccgttcacttccgcttttacggcatatacacctgtgggcggaacgatatagctgttatttaaaccgacattcgctgtcggaaacccgatggtccgccctcttttatcaccatgaatgacaattcctttaataaaataaggttgtccaagcaagacattcgccaattcaacatctccgttttgaagcgcagtacggatatacgaagaactgatttttttatcctgctccgttaatttttctaccattgtgcacccagcttttccgtctaaatcatccggcatggtcttcattgttcccttgccgtatttgccgtacgtaaagtcaaagcctgccactgcgtgctgcacattaaggccgataatatactggtctataaactgcttaggagaaagagaagcaaacacttcattaaatttaacgacatacagaacttctgtacctaattgttcaatttgatttattttgtcttcaagaggcgtaatcagatccttaggttccttatctctgcccaacacgtgagaaggatggggatgaaaggtcatcacagccaatgtcagacctttttcttcggctatttgcttcgctgtgcagattaccttttgatgcccgagatgaacgccgtcaaaatatcctaacgccatcactgattttgcctgctcctcttttattaaatgatgaggatgtgtaatatgtatcgtcttcacagaacggtcaccttttttctattgttcgcttttttgcatcaatacttttgccggctttaacagccctttttttgcaggatgagggaaatagatcgccaaacaggttccagattcagtaaagacggcgatacggtcttcacttgtcatttcagaaaactgctcgggcgtctcaagcaaagccccattttctactttcttagctaatgtatcacttatgatccatttcggcaaatgattgagcgcacgttcaataggaactgtatgctcttccacggttccggattgggcctgtgcttcgagctcatcaaaagtaaagcattcgtcgagagaaaaatctccggatgccgtacggattaaatgagacatatgagccggatatccgagcttttctccgatcatgaccgccagcgtccttacataggtccctttggagcaagtcactgtaaaccggaagcttgcggtttctccatgatgtttaatctctgtcgtcagggcaatgtcttcaatggttatcatacgtttcggacgttctacttcaatccctgctcttgcgtattcgtataattttttgccgtttacttttacagcggaatacatgggcggaatttgttcttgtttcccctttaaactgtttaaaaccttttctacatccgctttatcaatgtcgtgattgacaggctttatttccaccgtttctccggtttgatcctctgtagtggttgaaaagccaagcgttatttctgcatcatacgttttagatttttcagttaagtattcgactatttttgtcgctcttcctacacaaatcggaagcacgcctgacacttccggatcgagcgttcctgtatgtcctactttttttgtttttaacagctttcggatcttcatgacacagtcgtgcgatgtcatgccaacaggtttatgtaaaaggagaactccgttaaccatttgcctttcactccttcttttgagcttttttcttttaaacgaagaaagaggacagacgatatacgcctatcctctcattttttattcagatggtttctctgaatgtaattcgtgaatcagtgtttcgatccgattcccgtaatcgattgattcatcgaactcaaattcaatttcaggcgtttttcgaagtctgatgcggctgccgatttcggatcggataaatcctttcgcttttgccagccctttcagcgcttcttcccgttttttctcgtcaccgagaaccgagatatacacctttgcaatttgcaaatcacctgatacacgtacatccgttactgtcagaaaaccaattctcgggtctttcagcttgcggctgataatatcaccgagttcttttttcatttgctcgccgacacggtttgctctcatactcaattcaatcacctctaagttaaaaccactctgtcctagtgatcgtccgttcaatttcaggaaaagaatcgataaacgctaggacgcgttgcagttctttttctgtttgaacgcgagaggaagaaacagcggcgattccgaagctggttctttgccaggtgtcctgatagccaatctccgaaatcgaaacattgaacttgttttgaaccctggttaaaacccgcttcagaacggcacgcttttcttttagcgatcctgcatcataaatgatgcattcacactccgcaaatccgatcacgttctttcaatttcttgcatgacaaacgcttcaaggatgtcaccttcacgaatgtcattgtatttcttaattgtaataccacattcatagccttgtgaaacttctttcacatcgtctttaaagcgtttcagaacatctacttcgccttcaaagatgacgacgccgtcacgaattaaacggaggccgctgtcgcgcgtaatggttccttcagtaacatatccgccggcaattgtaccgattttagatactttgaatgtttggcgtacttctacttgaccaattactttttcttcatattcaggatcaagcatacctttcatggcagcttcaatctcgtcgattactttgtaaatgatacggtgaagtcgaatatctacattttcagcttcagccgtactcttagcatttccgtccggtctcacattaaacccgataacaattgcattggaagcagatgccaagataatgtctgattcagtaatcgcaccaacgcctgtatggatgattttcactttaacgccttctacttcaattttttgaagtgcagccgttaaagcttcagcagatccttgaacgtcagcttttacgatgaggttgatgtcttttacatcaccttgcttaatttgctcgaataagtcatcaagactgagcttcgctttatcgctgcgctgctcttcaagctgtttcgaagcacgggcttcaccgacagaacgagctgttttttcatccttaaagacaaggaattggtctcccgcttgagggacatcattcaaaccggtaatttcaaccggagttgacgggccggcagttttcacacggcggccaatgtcgttgaccattgcacggacacggccaaatgtattgccgactacgatcggatcaccgacatgcagtgttccagtctgtacgagcaacgtcgcaactgaccctctgcctttatcgagttcagcttcaataaccgttccttttgcctgacggttcggattcgctttcagttcctctacctcactgacaagcaaaatcatttcaacgagctcatcaatgccttttccagttaaagcagaaagcggcacaaaaatggtttctccgccccaagcttcagggacaagtccgtattccgtcagttcttgcatcacacggtcagggtttgcggattctttatctattttattcacagctacgatgattggaacctctgctgcttttgcatggttaatcgcttcaactgtttgcggcatgacaccgtcatcggcagctacgacaagaatcgtaatatcagttacttctgcaccgcgtgcacgcattgttgtaaatgcggcgtggcccggtgtatccaagaacgtgattttcttgccgttctcttcaatttgataagcgccgatatgttgagtgattccgcctgcttctccttcaacaacctttgttttacggatgctgtcaagaagcgttgttttcccatggtcaacgtggcccatgattgtcacgacaggaggacgaatttcaagatcctcttcattatcaggctcttcgtatttttccagctctgtttcttcaagcacaatgacctcttctgtttcaacaccatattctgatgcaatgagttcgattgtgtctttatcaagctcttggttaatggtagccattacgccaagaagcatcagctttttaatgagttctgaaggctctttgccaagctcttcagcaagtgcgccaactgttaaagtgccagagaatgtaattttctcaggaagctcttttttcggctttacaggcttttgctgatgttggtttttattgttgttgttgttgcgtttattttttttgttgttgttattcttcttgtttttgttaaattgattattctgcacgtcattcttctttccgtctcgaattttatttggttgatttccagctgattgctgattaaccccttgtggctgtttgtttttgttcgtttctgctggcttttgagatttagcagctgcgccgccttttttatatttggcatcaagctttttaatggccttttcttcaagcatggccatgtgattattcacttctaaatccatgttcttcagtgcggtcaaaatttccttacttgaaacatttaacgcttttgcatattcgtatactctcattttagccattcgttcacccccaaaaatattaatcgagcaagctgatcagcttattcgcaaaaccttggtcagtgacggcgacaacgacacgggcttctttaccgatagagcgtccaagaaccgcgcgactctcgacttttttataagggactttataataattgcacttgtcagttactttttttgctgtgttagatgatgcatcctctgtaagcaggacaagctttgcacgcgcattcctgatttcttttattaccaagtcttcgcctgacacgaccttacgagctcgattggccagacccagcaagggaaaccattccattccagacattttattttttcaccttttccgccagttccagcaattcatcgaaaatctggtcatcgatttgtgattgaaattgattttgcaaagtgtttttcttttttgctgctaagatgcattctttatccagcgttaaataagcaccccgcccattcttttttccggtcgggtctactgagatttcgccttctttcgaccgtacaactcggatcagttcctttttaggcttcatttcaccagtcactacacatttgcgtaatgggatctttttgtgtttattcacctaaagtcacctcttattcatccgattcagcagtttcaggctccgtaaagagcggctcatcatcttcttcaagttctctcggatagattccaagttctcttgcgtccgtttcgctcttaatatcaatcttccagcctgtcagtttagcagctaagcgtgcgttttgtcctcttttgccaattgccagagacagctggtaatcaggaacaataacagttgtcgctttttcttcttcattaacaatgacatcaagcactttggaagggctgagcgcattcgcgacaaattctacaggatcactggaccagttgacaatgtcaattttttcaccttttaattcattgacgattgcttgcacacgctggcctttaggccctacgcatgaaccgacaggatcaacgtcaggatcatctgtgcgaacagaaatttttgaacggtcgccggcttctctggcaacagattttagctcgacagttccatcataaatttcaggcacttcaatttcaaacaaacgctttaacaggcctggatgtgttcttgacacataaatctgcgggcccttcgttgttttttctacttttgtgatatataccttaatgcggtcatggggcttgtagctttcattcggcatttgctcattaaccggcagcaaggcttctattttgcctaaagacacgtagataaatttattgtccagacgctgaacgatccctgtcatgatgtcttcttcacggtcgataaattcagaataaatcacaccgcgctcagcttcgcgcacacgctgtgtgacgacctgcttcgctgtttgagcagctatgcgcccgaaatccttaggtgtaacttcgatttcgacgacatcgccgaccatatattccggatggatgccctgtgcctcttcaattgagatctctaatctctggtcgtatacttcgtcaacgacatcttttcttgcaaatacacggatggagccagtttcacggtttagatccacccgtacattttgcgcttgattaaaattccgcttataagcagaaattaacgcagcttcgattgcttcgatgataatttctttactgatgcctttttctttttcaagaatcgtgagagcatctaataattcactgctcatttaacggtctccccccttaaaacatttgtattcattagaatgtaacagctaatcttgcattagctatcttttcatacggaatattgatccgtttctttcttgttttgatcgtgatctcaactgtcactgtttgtccatcaaattcagccagttcaccttcaaacacttttacgccgtcaataggctcatacgtcttaatgtatacgttttttcctagtgatttttcgaaatcggcttttttctttagcggacgctcagctcctggagatgagacttcaagaaagtaattttggctgattgggtctgcctcatcaagcttttcgcttaaagcttcgcttactttggcacattcctcaatatccacaccgtcatcggaatcaataaacacgcgaaggaaccagctttggccctctttgacaaattcaatgtcaacgagttccagctgaaggctgtctacgattggctgagccatttcttgaacgatgtcagtcacttttttgctcatgttcttcctccttgtgctgtcgatctcatattcgtctcgtcactctgcataaaaaccctgcttcaaaagagcaggggctaaaaagtaaacgatgaacatgtcgagacaaaattctcctgttcaatacaaaagagcgggtttccccactctttgcctcggtaatcgttagcatttccaataaaactataccataaccatatttttattgcaaatggatatacgcttaccttcatacctaagcaagtgacagaaactctaatattacgatggcactttttgcgcttatgtatgcatagaagcagaatttctgagaaattctgctttccatattagaacagtgacaattggttttgatcaggcagtgattccagacagccgtggcgatctaagtactctaaaatcgtttttgatactttccctctcttttgcaaatcttcttttgagaggaattcgccttcttcgcgagcttttacaatgttcaaagcagcgttcgtccctaatcctggaatagagttaaacggcggaataagactgttgccgtcaataataaactctgtagcgctggagcgatataaatcgactttttggaatgaatagcctctctcacacatctcaagcgctaattctaaaacagtcagaaggttcttttccttcggtgaagcatcaagtcctttagcgtttatatcctccattaccgctctgattgctgtagagcccttgatcattgtatcgatatcaaagtcatctgcacgaacggtaaaataagccgcataatacaaaagagcatgatgcactttaaagtaagcaatgcggactgccattaagacatatgccgcggcgtgggctttcgggaacatgtatttaatctttttacaagaatcaatataccagtctgggacattgttatttttcatttcttcttcccattcaggcgttaatccttttcctttacgcacgaattccatgattttaaaggcaagggacggctcaaggccttgatagattaaataaaccataatgtcatcacggcagccgataacctcactcagctcacaaatattattgtggatgagctcctgtgcattgccaagccatacatcagttccgtgagacaagcctgaaatctgaacgagctcagaaaaagtggtcggctttgtatcttcaagcatctgccggacaaatcgggttccgaattcaggaattccaagagtgcccgttttacagccaatctgttcttcagtcacaccgagtgattcggttccctggaagatcttcatcacttcaggatcatccgtcggaattgttttcggatctattccgcttaagtcttgaagcatccgaataacagtcgggtcatcgtgtccaagaatatcaagttttaacagattgtcatggatggagtggaagtcaaaatgagtcgttttccactctgaacctgtggcatctgccgggaactggatcggtgaaaaatcataaatatccatataatccggaactacgataataccgccagggtgttgtccagttgtacgttttacacctgtgcatccctgtacgagccgatctatttcggcaccgcgcatatgaagattgttgtctccggcatagccttttacataaccgtaggctgttttttctgccaccgtgcctattgttcccgcacgatatacattgtcttctccgaacaatacttttgtgtaattgtgtgcttgcggctgatattcccctgagaagttcaaatcgatatcaggtactttgtcccctttaaatcctaagaacgtttcaaatggaatatcatggccgtcttttttcaaaggcgttccgcaatgaggacatgtcttgtcaggcaggtcaaaaccagaaccgacagaaccgtcattaaagaactcagaatgctgacactcaggacaaacatagtgcggcggcagcgggtttacctcagtaatctcagtaagtgtcgcaactaatgaagatcctacggaaccacgggaaccaacgagatacccgtcatctagtgaacgttttacaagtttgtgagagatcaagtaaataacagcaaatccgtggccaataatactctttaactctttttcaatccgcgcttcgacaatttcaggcagctcttccccgtaaatgcttcttgcacgctgatagctcatttctctgatctcttcatcagcgccttcgattttcggcgtatataaatcatctttaatcggcttgatgtcatcaactaaagaagcaaccttttgggtattggtgactacgatctccttcgctttttcttcacctaagaaagaaaaagcttcaagcatttcgtctgtcgttctgaaatgcactttcggcagttcatgcctattcagcggatttgccccgccttgtgaggatattaagatctttctgtagattttatcctcatcattcaagtaatgaacatttcccgtagcaacaaccggtttattaagcttttcccccagcttcgtgatattcgcaataatttctttcagcgctttttcatcacggaccagttcaagctccagcaagtgacgatacacttcaggcggctgaacctcaaggtaatcatagaatgacgcgatatcttccacctcttcaggcgatttttgcatcattccctcaaaaacctctcccctgtcacaggcagaaccgatcagtagcccttccctgtatttctcaagctgagatctcggaatacgcggcactctgtaaaaataatgaatatgagaaagtgacacaagcttaaataaatttttaagtcccgtgctgttcacggcaagtaatgttgcatgatacggtcttgatctttgataagcattggactgacccatattttcattcaactcatcatggtactgaatacctttttcagctgcgtctttcagcattttcagaagcaaataagcggttgcctcagtatcatagatcgcacggtgatgctgtgtgagttcgatatcaaactttttacaaagtgtgttcaaccggtggttcttaaattccggatagagaaaacgaccaagttcaagcgtatcaatgactgggtttttagctttttcgacttcaagaagctttttataggctacatttaagaatcccatatcaaagcttgcattatgagcgacaaggatatcatcgccaatccattctctgaaatctcttattacatctacgacatccggagcgtcttgtagcatatcatcagtgatccctgtcagctctatgattgtggcggaaagcggacgatgcgggttcgcaaacgcctcaaatttatcaataatttctccgccttttacttttactgcagccagctcaataatggtatcgtatacagcagacaatcctgtcgtctcaacgtcaaaaacaacatatgtttcttcttcaagcagacgatgtgcggcattataagcaattggcacgccatcatccacgagattcgcttccatcccgtaaatcattttaattccatgctttttggccgcagaatacgcatcagggaaggattgaacgacagcatggtcagtcaaagcgatggcctcatgcccccattttttcgcctgttcgacaagctttccgatacccgtaacagcatccatttggctcattggggaatgaagatgcaattccactcttttttctccttcaggtgctgaatcttcacgggtttttgcttttatttcgtttacgtcatttgcgatcatgacaaggtctctgacaaatgtatcattttgaatgcttccgcgtgcttttacccacattccttttttcagagacttcatcagtgccgcatcttctttttcacgtgcaaacattttgatcaaaatactatttgtatagtctgtaattttgaagatacacagcgtgcgcccgctcttcagctcgcgcgtctccacatcaaacacataaccttggaccgtaattcttcgttcttcgtccatgatgctgtcaagtgtccggatttcctcgttatctttaatttgataaccgataacaagaggaccagatggtgcttggtcttcatcactttctttatctttcttctccatttcaatcaaggcctgcatagcccgctcttggtcttccgcaagcttttgctcccgaaacttttgaacttcctgctcggatacaaatatttcagcatcaagctgaagatctggaaagccaaattgacggtagcctgcttgtatcatggaactgtatttgttctttagcgcagccgcttctgtatctgttttggttttgacaatcagtttattgcccttcagcttcggtttttgctggtttaaaagactgatgatcggcggcgaaatgccctgcagttcttcaatgcagcgtgaccagtagtcttgaacgatactttcactgacctcggcatcctgaacttcaattgaagatgtcacttttgctatgtgggcaaacgattgcgtcagcctcattgttaatgtgtcatatatttgaaaaggcagcaaagatttaaattgaaaatgaaaatgccaagatttagaagctttgtgaattgtcagctttttaatctcgccatgttcaaagtatgtcatgaaggtatcatctgtcatattaatctgctgcagaagaatttgaaactgccttctgtttactgataactgttccattaagacagtatccctccctaaaaacatcataagtgaaggtacctcaggcaatgaggtaccttctattatttctattttaacatgttttttgataaatcgttatggtgattactgcttgctgataaacgcagataattcgtctactgaaatctcagttgactcaccagtttgacgaattttcacttcgacgattccttcgtcagcccgttttccgacagtgatgcggattggaaggccgattagatctgaatcagcgaattttacaccggcacgctcagcacggtcgtcatagagcacttcatagccttccgcttttaaatcggcatacagcttttcagcaagctctctttgcccatcgtttttcatgttcaatgcaagaatatgaagatcgtacggggcaacgctttttggccatattaatcctttttcgtcgtgatgctgttcagcaatagcagaaagcgttcttgacacaccgattccgtaacagcccatcagcattggctgcgcgcgtccgttttcatctaaatatgtcgcattcatcgcttctgaatagcgtgttccgagcttaaagacttgtccgacttcgattccctcagcaaaacggatcgttcccttgccgtctggtgaaggatcaccttctttaataaaacgaagatcagcaaattctttaatttgcgcgtcacgattcacattgacatttttataatgatgatctccttcatttgccccggcaacagcattaaccattgctttcacagcttgatcggcatatacttccacatcctgatgaataccaacagggcctacaaagcctggctctgttccgagctgctgaatgacctcttcatgtgtggcaagctctacaacttctgcatgaagcaagtttttcactttaatatcgttaacttcatgatcccctcttacaagcactaagacaaaacggtcatcagctttaaacaatactgacttaatgcacgcttcagccgaaacctgtaagaacgcagtcagttcttcgattgttttcacgttaggcgtatgaaccttctctagagctttaggctcttcatctgaaggaacttcctggtgaagaacttcagccatctcgatattagccgcgtactgtgattcatcagaatacgcaatcgtatcctctccgatcgcagaaagtgccataaattcgtgcgtatcctttcctcccattgcgcctgaatcagcgataacaggtcttacattaatgccgcagcgggcaaaaatattagaataggcctcgtacattttttgatacgtttcatctaggctctctgcagatgcatggaaagagtacgcatccttcataataaattcgcggcctcttaacaaaccgaagcgaggacgtttttcatctctgaacttagactgaatttgataaagagtcagagggagacgcttataagatttaacctcatcgcgaacaagcgaagtaataacctcttcatgcgttgcccctaaagcaaattcacggccatgacggtcttttagtctcatcagttcgggaccatacgtataccatctgcctgattcctgccatgtctctgcctgctgcaatgcgggcatgagcatttctacggcatcaattttctccatttcctctcgaacaatctgctgaatgttttgaatcaccttatacgcaagaggcatatagctgtataccccgctcgtattctgtctgataaatcctgctctcagaagaagctgatgactttttgcttcggcatcagctggaacttcacggagcgtaggaataagcgtcaagctttgtctcatttcttcgcacctctgattgatttacttttcgtttacaaaaacagccgctggatatcgttccatgtgacaaccagcataagaagcattaagaaagctactccgataaacacaacaaatgcttctttttccctgttaatcggtttgccccgaatcgcttcaataaatagaaacaacagtcttcctccgtcaagcgccggaatcggaagtaggttgacaatcccaaggttaatgcttaaaaacgccgcaaactgaaataagttcacgatccctgttttcgccacttggtctgtcatgtcatatatgccgacaggacctgacagcatatcgagtttaaattggcctgttactaatttgctcagattggttaaaatggctttggtgacatcaactgttgatgtcgcgccgtaagcaaccgctgagagtacgcctttttcagtcggcgcataggaaccgaaacgtccgattgtttttttgttctcatctttaacagcttccggagtcaccgaaatatgaagcgttttgttatctctttttaccgcaacgtccatttctttctccgggttttcttttacagcggagacaatgtcagtccaagacctcattttctctccgttaatgctttggatataatccccttcttttagccctgcttcagccgcccgtccattgtctgtcagctgcccgagcataggttcatttgacggtacgccttgaatcagcccaagcatcactaaaatgacgtaagctaaaataaagttcataatcggccctgcagcaattgctttaatccgctgccatacaggtttggaaccaaattggcgattatacggcgcaatctgcacttcttctccgtctacaataaaaaaggatgtttcgctgacagtaaagctggaaagttcgtcctctttcccctgttcataaccggtgatcttcatgtcatgctctagatccgctgtttccacttcaatgactaatgcatccggatatttttccttttgattgatgatgactttctcaacttgatcttccttattaaacagaagcccgaccgtgtatccgggtttcacctcaatcatttccggatcttcgccggccatacgaacaaatccgccgaccggaagcagcctgatcgtataaactgtttcattttttttgaaagaaaaaatctttggaccgaagccgatcgcaaattcacggcagagaattcccgctctttgggctagcaataaatggcccagttcatggaagaaaacgagcgttccgaaaataatgataaacgctataactgtattcacgaacataccaccttatgtgagtattgaattgacgtatccccgggtatctttgtccacttcttgaatgtccgccaggctcggttttttcagtaattgatggcgggttagtgccttttcgatacagtcttcaatagccaaaaacggtatcttgccagctaaaaaggcagcgacagctacttcgtttgccgcatttagcactgtcggcattgttcctcctattttacctgattcaaaagcaaattgtaagcatcggaacctgtcaaaatcagctttctcaaaatgaaggctgccgatttcccataattcaagccttttcgcatctggtaatggcaatcggtcaggataagtgagcgcatattgaatggggactctcatatccggagttccgagctgtgcgatcacacttttatcatggaactcaaccattgaatggatgatgctctccttatgtaaaaccacatcaatttgttcataaggtatatcgaaaagccagtgtgcctcgatcacctctaatcccttattcatcattgtagccgaatcaattgtaatttttgcacccattgaccagtttggatgttttaatgcatcttcaactgttactgattcgagctcctcccgcgtcttgtcccgaaaacttccgccggatgccgtaatgatgaggcgttcaatgtttttagcctgttcgccttgaagagcttgaaaaatggctgaatgctcactgtcaacaggcagcagcggaacatcatatttcttagcatgttcttttactatatgccctgcagtgacaagagtttccttatttgcaagcgcaattgtttttttctgttcaattgcctttaatgtcgggataagaccgacgcttccaagcaaagcgttgacaacaatgtcaacctcctccatcactgctgcttctatcagtccttcttctcccagcccgatttggcattcaaaagaaaaagacatttgttttaatttatgatatgtatccagatcaccgacagagacaaacttcggctgaaagacctcaatcattggaacggccttatcaatatttctgccaaacgacatagataccagctgaaattggtcttgatgtgcacgcagtacatcaagagtctgttcgccgattgatcctgttgctcctaaaagacaaatatttttcaaagttgccactactcctattcttattgctgcatgatcagtctcatattcatattagacttttttatgaaaaaagggcaagcagaaagtacaagaaaggcatgacaaacaagaaactgtcaaaacggtctaatataccgccatgcccgggaagaatattcccagaatcctttacatcgtaatgtcttttcaaggcggattccactaaatctcccagttgtccgaaaacagacaaaaacagcgtgatcaacagcagatagatatacgggatcggaagttgtgcaacaagctgaaaaatcgtcgccaatacaagtgcgatgacaattccgcctgcaaacccttccactgttttattcggactgatttcaggccacagtttccgcttcccaagcgatttaccgacaaaataggcaccggaatccgtggaccaaatgacaacacacgcataaaaaatgtatgttaatccgtattggtcaagatttctgatttcgataaaataatgaaaacacattccgatgtaaattgctgcaagcgtaataaacccgacttcatcaaaagtaaaggtgttcttgaccaacactgtgtaagtcagcaatagcagtaccgcaaataaagcgatttccattttggaaattccgtccgcttcaaaaaacgaatactggcttggcaataagaacatccacaacaataaaagaccgatcaaacccggcagtgaaaccagcttcagctttttcatccgtaaaagttcaaaaagcgccacactgcccatagcataaattaatatggtgaacggcaattccccgacaataaccaaaaataaaaatacaattgctgccagaacacctgtcaaaattctttgtttcatgtccaccatcctctaaattccgccaaacctccggcctctctgctgaaactctcctaacgcctgtaagaagtgatcttctttaaagtcaggccacaagacgtcagtaaagacaaattcactgtaggcaacctgccatagcataaaattactcagccttatctcgccgctcgttcgaattaaaagttcaggatcctgcaaagattcagtcatcaaataagtagaaaaaagcgattcatcaatgtcttcaatattcaaagagccttccttcactttttccgcgagtgattttgcagcactgacaatttcagtacggcctccatagttaagagcaaaattaaggatcattccgtcgttttgcgccgtgtcctgtacagctttttcaatcgcacgtaatgtgtgcgccggcaaagccgtttcatccccaatgatccgaacctgtacattttcctcaacaagctctggaagatacgtattcaaaaattcttccggaagcttcattaaaaaatcgacttccattttcggtcttttccagttttctgttgaaaatgcatacaatgtcagtactttgacacctaattcgtttgcgagcttcgtggtcctttttaccaccttcatcccttcatggtggcctgcaattctgggaagagagcgttttttagcccaacggccatttccatccatgataatggcgatgtgttcgggaatttctcccttaagtatgtcttcttttgtataacgttctaagttggaagccgctgtttgctgattcttccaatttttgagtatgttgagcatgagattcctccgtcacccaaaaaggttacattccctgctgataatcaatgtaatcaacagtattaacaaaaaaaccccctgtaaacatgagagggtcttttcactattatctattgtacatagtttttcattaaacttccatgatttctttttctttgtcttttgtgacactgtcaatttttgacacatattcatctgtcagtttttgaacgtcttcagtggaagcacgcagttcatcctcagtaatgtctccgtttttctcaagttttttgagatcatcgttagcatcacggcgaacgttacgaacagcgacttttgcttcttcagcgtatttttttacaactttcactaattctttccgtctctcttctgttagtgccggaattgcaattcgaatcatattgccgtcacttgttggtgtaagacctaaatcagcttttaaaatcgctttttcgatatcgccaattgctgttttgtcgtatggtgtgataacgagcatacgagcttcaggcacgttaatagaagacaactgatttaaaggtgtctgcgctccgtaatattcaaccgttactttatctaataatgatggatttgcacggcctgcgcgtacagtagccaattcgcgctgataagcagcaattgctttttccattttttcttttgtttgagttaatacttcttttgacacgttatttccccctcacgatcgttccgattgattcaccgataacggcacgtttgatatttccttcttccataatagaaaagacgataagcggaatgtcattgtccatgcataaagaggaagctgttgaatccatgacttccaggccgtctttaagaacgtcaagataagaaagtgattcatacttaacagctgattcatcttttctaggatcagcattatacacaccgtcaacgttatttttagccatcaaaataacgtctgcctcaatttcagcagcccgcagtgcagctgtcgtatcagttgagaaatatgggtttcctgtgcccgcagcgaaaataacgacacgttttttctctaagtggcgtatcgcttttcttcttatgtacggttcagcaacttgtctcatttcaatggatgtttgcactctggactggattccgagtgtttccaagctgtcttgaagagcaagcgaattcattactgtcgccagcattcccatatagtcagcagtcgcgcggtccatgcccaggtcacttcctgtttttccgcgccataagttgccgccgcctactacaacagccacttcgacttcaagctcagcgatttccttcacttgctttgcaatggattgaatgacagtcgggttaattccatttccctgttctcctgccaatgcttccccgctaagctttaatacgatacgtttgtattttggtttttccatgataacctccaagtgtaaacattgccgttttctattatgcaagagaaaaaaaggtttgtaaatatagttttaaaaatagggaacacaaaatgtgtcccctatactgcctgaaaagacgcgacttagccgcgaaatcttttcaccattattttttcacttggttcattacttcttcagcaaagttttcttgacgtttttcgatgccttctccaacttcatagcggacaaaagtttgaacagtagcgtttttcgctgcaataacttgtttcactttttcatctgggtttttaacgaacgcttggtctaatagacaaatttcttcgaagaatttgttcagacggccttcaaccattttcgctacgatgttttcaggtttgccttcttggagggcttgctgagttaagatttgacgctcatgatttgtttcttcttcagatacttgatcacgagaaatgtaacgagggttaaccgcagcaacgtgcattgcgatatctttcgcagtttcttcatcagttgtaccgttgagaacagttaatacaccgatgcggccgcccatgtgaaggtaagcaccgaatgcagagctgtcgtcttttgtaagaactgtaaagcggcgaagagtgattttctcaccgattttagcaactgcgcttgtgatgtactcttcaacagttgagccattttccattttttggcccattgcttcttcaacatcagctggcgtgtttgcaagaaggtggtcagctaaagtgttaagaagctctttaaaaccttcgtttttcgcaacgaaatcagtttcagagtttacttctaggataacgcctttgttgccgtcagttttaataagagtagaaccttctgctgcgatacggtcagcttttttcgctgcttttgcaatccctttttctcttaaaaggtcaattgctttgtccatatctccgtcagtttcagttaacgcttttttacaatccatcatgcccgcgccagttttttcacgcagttcttttacttgctgtgcagtaattgccatttgtattcctccttatatgtttaaacaagagtatgtatattacacatttttcttgaaaaaaggtgataaaaggcagtccctcttatcaccttttgaataggttacgcagttgttgtttctgtttctggtgcagtttcttcagcaacttccgcttcttcttcgccttgcttcgcttctaagattgcatctgccattttagaagttagaagtttaacagcgcggatagcgtcatcgttcgctgggataacaacatcgatttcatctggatcacagttagtatctacgataccgatgatagggatgtttaatttacgagcttccgcaacagcgatgcgctctttgcgaggatcgatgatgaataatgcatcaggaagatccttcatatctttaattccgcctaggaatttttcaagacgctctaattcttttttcaattgaacgacttcttttttaggaagtacatcaaacgtaccgttttcttgcattttttcaatgtctttaagacgtttaatacgtttttggattgtttcaaagtttgttaatgtaccgcccaaccagcgttggttgacatagtacatgccagagcgttgagcttcttctttaacagaatcttgagcttgtttttttgttccgacgaaaaggatttttccgccttcagcagcaagatttttagtgaagttgtaagcttcctctacttttttgactgttttttgaaggtcaatgatgtagattccgttacgctccgtgaaaatgtaacgcttcatttttgggttccaacggcgtgtttggtgaccgaagtgaacaccagcttcaagcaattgcttcatagaaatgactgacatgttatttcctcctaatataatggtttttttcctccgcttaggtcatttttgtgcagaactgccgcctgcagcaccctctgcataaatcgttaagcgtgtgtatttaacaccaagacataatataacacagctttatccgacaatcaagaatcctttacacctttggagcgaaattttaaaaatagctcgatttctgtctttccgctcttcattttctgggcaatttgacttgccgaatatccctgttcatataattctatgacctggtcttcaaatgattggacctcactgtttacgagctcttcccgacggtcaacctctgtaatcagaccttcaatatgttcaggaagattctctgcctcttggactggatcccgctcttgatatgtttcagaggtctgaaggcctgacttttgggattcttcatctgattgacttgcagatgaagctttattttctatcagtttctcattttcttcttttaattcaagcagaaatgccgccaaggtgttttccgtctcttcaagtatctgtttttgctgtttttctgtttctttcactgcagcgagcctcgtatacaggataatgacagcgtacagaagaacgccgtggagcgtaaagcttaaaagccataatagtgttgacatgtttttcactcgctaaccatgaaattcattattgtatcactttttccagcagattctttaatttaaataatgcctttgaatggatctgagatatgcgggacgtagaaagatttaatacttgtccgatttctgtcagtgtcaactcctctttgtagaacaaactcacaaccagctgttctttttcagagagttcgtgaattttttccgcaagctgtgcaatcagttcatccttcataatcttttcttcaggcggaacatttttgtcatctctgatcatgacttgaatgttttccccatcatcttgatcatggagcttttcatcaattgacagcagatttgcaaaaaaaccttcattcattgttgacacgacatcctgtaccgtcattccgagttcctctgcaatttccgcgggcgatacattccgaagataccgctgttcaagcttttcaattgctgcttcaaccttttttgttttttcgcgcgaggttctgggcagccaatcttctttacgaagcccgtctatgattgcgccgcgaattctaaacgaggcgtaggtatcaaattttaagtcccggctggggtcaaatttttcaagggcatcatataaaccaagcataccaaggctcataagatcgtctttatgcactgatttcggcagcccgacagaaattctgcctacatgatatgtgacaagcggcatgtaacggcgcattaagtcgtcaccggctttaggatctttccactctttccagcgcgtccaaagcacctgatcttcataattcaaggattgcattgttatccccctaataccttaattaaatcgttttttcaccttgtttaacagttcgaatatgcagcatgcaggacttcggttcaaattctatcgtccggccgcttgagccgcccgtatcttcactaataataggaatattaaataaagacagctgttcttttatcgctaatacatttctcggtccgatcttcatcaaatcatttgtcgatttaaatttaaacatctctgatccgccggccagctttgcttttaatgcaaatttccggcatcccgcttctatcagcatatcaatcgtggtctgtacggcggtgtcagcgtacttagcccggttgagctcggcagttttcgataacgtcgaatccggaagcatgacatgaacaagacccgccgtttgcttttctttatcataaagcaccagccccacacatgagcccaaaccagaggtccggatggtatccgggaagcgggcgatcttcacgtcagcaatcccaacctttataacaacagcctcagttgtactcataatgatgcacctaaggcgacaaagagcttttcaaatgaatcatagtccggcagcataaacatatgcgctttcagctcctgctgatggctttggtcaaaaattgacgtgtcgacaacaatggcgtgttctccaacctgactgagctccatcagcccttcgctgatcactgctccgaacatgtccaaagagacttcaggaacacttggatagagctggagtttcgtcaaatccgccaaagctgttaaatatgaccccgctaaaatattgcccagttcatgcaaagcggatgagctcatgtggtcttcacctaagtcctctatgtcaaaatcggggtttccaatcagctctctgataaactgctccgcctgaaaaaaaggcattataaagaacattgaacccgttaaatcgccttccattcttaaaaagatgctggcaaccgggacatcggcgccgccgaaaaaatcaacaagctcatcaaaagacagcagctttgcaaatgggacttccatatctatctttctatttaacagctgggccattgcagaggcggagtggccggcgcctatattgccgacttcccgcaaaatgtccatctgctcttctttgattccattaaaaatactcatgtcataacccctttaagattaagcttgatcgggcacagcggactgagatgattctttatccaaaaccgcgttcgcatcaataatatttaagagtctgttctcttgtttcacaatctgttcgatcgacacatccgtatctttctgaacgccttctggagcagattctatttcactttcgtgtacggtaatcacatcgttcgcttcatccacaatccagccgacttcaatatcacgataagcaataatgataattcgtgtttcatcggtaatttcatactctggcaaattcaggcgttttcttaaatcaataaccggagtcaccaccccgcgtaaattgattaccccgcaaatatatggttcgacgccaggtaccctcgttggcttttgccatttttcaattgatttcacctgagtgacggaaatggcatattctttgccatttaccataaagactatcattttttcgcctgttttaatttctgcagtcatgtgagacacctcctcgaatggttaaataatcagtgcattacaatcaataatgagcgctacttctccgtctcctaaaatagtagctccggaaattgcaaagacgtttgttaaataatctccgagtgatttcagcacaacttcctgctggccaataaaggagtccaccacaaatgcagtaggtttgtcgccttttttcacgacaatgatatggagctgttccgcatcttttcttgtatcttctattttaaactcttcttttaaataaacgacagggacaatatgccctctaaagtcaatcacttcacggtcatgcgtttgcaaaatgtcttttctgtcaataactgctgtctcaatgattgaagaaatcggaatggcaaatatctcttcttccaacttaatcagcagaactgaaataatagacaaggtaagcggcagctggatgctgaatagagagccttgaccctcggctgatttcacactgactgaaccgccaagagactccagtttgttttttacaacgtcaagtcctacaccgcggccggaaatatcagaaatttggtcagcagttgagaaccccggagcaaaaatcaattcgtaaatttggttgtcttctaaggtttcagcttctttttccgttatgaccccgcgctcaagcgctttttccagaatttttttgcgattaaggcctgcgccgtcatcctctacttcgataaagacatggttgccgctgtgataagctttaagcacaacttttcctgattccggttttcccttttgcaaacgtgtttccggcgcctcgataccatggtcaatactgtttctgatcaagtgaacgagtggatctccgatttcatcaattactgtacgatccagttcagtttccgcaccgatgatcgagagttcaatttttttattcagctctttctgaagctggcgaatcattctcgggaatctgttaaaaacagtttcaaccgggaccattctcatattcagaataatcgattgcaaatctccggaaattctcgtcattcgttcaaccgtttcagtcagttcattgtgctcaagctctttcgcaatctgctcgagacgcccgcggtcaatgacaagctcttcaaataagttcattaaagaatcaagcctgtcaatgttgacacgaattgttttagatccgccggctgaatgcttcgcctgctcatcgtttttagcaggctgtttttgtttctcctgcttcgcaggtacagctgctgctggtgaatcttcttgcttagattcttcaggcttttcggctgatgttaaaggagccccttgaatgacttcaacatgctcaatttccgacacgccattgattaattgttcaatgtcttccgctgattgatgtgttaagaaacaaacttgaaaatcagttccaaaatcttccgtttcaagcacttcagcacttggaattgttttggctacttctccgacttcatttagtttttcaaacaccatatagacacgaactgcttttaacatacagttttcgttcagagaaatcttgatttcatatcgtttgaagccttgctcctccgcttcttgtataactgtacgttcaaattcatcatattcccaatcagatgctgaactctgtgcttctgcaagttccgcggaggcagcggattcagcgtgcgcaccattcacatcaagcttggcactcacttctgagatatctcttttaccatccccgccatcaataatagactgaaccattgcttccaggtgatccagagcttcaaacaaaatatccagccagtctgaggtgactgccatgtctccgtttcggaatgcatccagcacgttttcaagcagatgggttaggtgtgctaaatccgtgtagcccatcgttgcgctcattccttttaatgtatgggcagccctgaatatatcatgtacgagctgaagatcagtcgggtctttctctaaaagaagaagcttttcattacatgtttgtaaatgttctttactctcatcaataaagacatctaaatactgattcatatccatttgaatcacaccctctcttttttcacacagcttgtgatggatgctgcgatatcttccacatgtttaatctcatgaatgagacccgctttaacagcagcttttggcatcccgtatacgacacaagattcttcagactccgcaatggctttcacattgccggctgttagcatgtcctttagcccagcagtgccgtcactgcccattccggtcatgataaccgctactttttcataatctgtcagtttcccgacagaacggaataaataatcagcagatggtttatgacggcttggggtgtcatggttatcaagcacaacctggagtccttcgctgtttttaataacggatatgttttttccgcccggtgctatgtaaacacagccgttaagagctgcttcaccatcttttgcttcttttacctgaatgtcagataaatgattcagccgatcagccaaagaagcagtaaacccttcaggcatgtgctgaacgacaaccactggtgcgttcaaatctttagggagcttcggtatcaccttttgtaacgctcgtggaccgcctgttgatgtgccgatacacacaatttgtctgcccgtgccaggtttcggtttgcttaattcaggcttaacgacagcacgcacaataggttcgggccgaactgtctgggaaacaggacgtttccgcttgccggaaagtcctgccgcgacgacacgctcaactaattgttctttaattttgtatagatccagagatattgaacctgatggctttgtgataaagtcaaaggcaccgatctccaaacaattaattgtgcattctttacctttctcggtctggctagacaccataatgaccggcaagttataaatctcaataattttgcggagcgtatctgtcccattcatgaccggcatttcaacatcaagagtaataacatccggttttaataattcaatcttcttaagcgcttcttctccgtttctcgcagttccgattacttctatctgcttttcctcggtcagaaaatcacttatcatttttctcataaaagctgaatcatcaactacaagcacacgaatcaaattaagccctcctcattaaaaaagaagataatttctcaataaatgtctgtttgtcttctttgtgtctcgtttcttctcttccaaacaaggcgtccgctaaaatacggactgaccggctggcttttgcctgagggctttttatgaaaaaaggaacctgttcgacaaccgctttgctcacgatcacatcgtcagaaacggaaccggcaaactgaacctgaacatccaaaaacatatgaattgtacgggagaggcgggcaaaagcgtcaagcccttccttttggtcacggcaccgattgacagccaccttcattgaaagcttattttctgtcaaaaccaagtgcttgacagcgctgtatgcgtccataatggccgtcggctcgggagttgttataatcaaaatatcttctgctgataaaataaaaggcagttgatcttttgataaacccgctcccatatcaaacagcacataatcgaactggcttaatgcatgagaaagttcattggcaaaaaacgtccattttctctgatcgagctgaaacatcacatcaagaccggttccccctgatatataccgcaaaccctttgggccaatggataatgactggagcaaaggcttacgatcggttaaaacatcaattatcgtggcagacgatgaatttcctattaatatatcaatgttccccatcccgatatcaaggtcgatgagcagcaccttcttacctttatcctggagcgcaagtgccatatttaaggtaatattggattttccgacaccgcccttgccgctgatgacagcaagtgtcttcgctttttgtgaataaaccattggcagaacgcgctcacgtttttccattttcgcccgtaaagttgctgcttggtcatatctgttcatctgcacagcatcctcacaaaaccaagtggagatacagtctgtatatcctcaggcacattctgtccgtttgtcataaacccgacacctatttttgattctgccagtatattaaatacagaacctaaggaagtcgtttcatctattttcgtaaaaatatactgattgacagggacggatgaaaaccgtttgacaatatgcttcatatcttcatattttgcagtcgcggataaaacaagaaatgactgaatgctgctctcaaaaggaatcgtttctttcagttcatcaatgtattgcgggtccttgaagtttcttccggctgtatcaacaaacacatgatcatactcagaaaataactccttcgcctgctgaaattcttcttttgtatagcaaacttccagaggagcctgcagcagttcagcgtatgttttcaactgttcaacagctgcaatacgatacgtatctgttgtaataaaagcgatttttttatgtttttcaagcatagatatggctgcgagtttagccagtgtagttgttttaccagcccctgttgaaccaaagagaacgatatattttgaatgaattggctcctgccacttgtctgctgagggcagcatatcgcatagtatttcctgaagtttgccgacaacattttcttcagtcaagccgcctgcttcaacagagaagcgaagcaattttttcagagtgttcgttttcgtagactctttgatccctgtttcttgcaaaagcttttctgcttttcgcagcggctcaggaagtacagattgatatgctgaaaaatcacctagctcctgttgcgccggaatttgagggggatatgttctctcctctattttcggactgctgaccggagtttttaatgtttgtttcggttcagctgccttctgaggcgtttttttctcaagaaagtcctgatccaatacggcgattacttcaacagcaggcttgttgatgaggccaaaccattttcgctttttaattttttttgaatttaatatgaccgcttcattacctaactcttttctgatgagaagtgcagcttcttgcattgaagcagcagtaaatttttttattttcattaaatatccaccactccaatgctttgtacctcaacattcgcctcaagttcgttataagagagtaccggaagatcagggaagtaccgttccagaagctgcttcacatacattctgacaggcggcgagcaaagaagaatcgcggtttcctgacgtaatgagagctgttcagcttctttagcgacagagcgcactatactttctgaaatatctggttcaagtgataaatagttcccgtgttccgtctgctgcacaccgtctgctattgctttttctacacggccggaacaagtaacaaccttcaacacttcattttctttggcaaactgggctgtaatttgtttagcaagcgcttgtcttgtatactctgtcaagagatcagaatctgttgttaatttcccatagtcagcaagtgtttcaaaaatcgttactaagtttcgaattgaaactttttcttttaaaagcttagcaagcactttctgaatatcaccgacagacaatggattcggcgtaacctcttcaaccaggactggatacgattctttcaagtgatcgatcagctgttttgtctcctgccttccgatcaattcgtgggcatgctgcttaattttctccgtaatatgcgttgaaacgactgatgcaggatcaactactgtataaccaagcatatcggcttcatcctttaccgcttcgctaatccatttagccggcagaccgaatgaaggctccactgtttcaatcccttcaatgagatcgtcctcaggagtaggcgacatcgctaaataatgatcaagcaacagctcgccttttgctacttcgtttcctttaattttcaatcggtattcattaggctgcaacgctatattatctctgattcgcacgacaggaatgacaagcccgagttccaaagccaactgacggcgtatcataacaattcggtctaataaatcaccgccttgattggcatcagcaagcggtatcaggccatatccaaactcaaattctatcggatctatatgcagaagctgaacaacactttcagggcttttaagctcgtccacctcagcctcttcctcaagaatctcatccacttcttctttttccttacctgatttagatagtgtatatgcgccaaaagcaagcaatcccgcaagcggccccgtcagaaggatgccgatcggagtgaaaatacctaaaagcatgatcgtagctgctgcgacgtataaaagctttggatacgcaaacagctggcctgtaatgtcatgccctaagtttccttcagatgcagctcttgtgaccacaatacccgtagccgtagaaattaacagtgccgggatttgcgaaacaattccatcccctacagtcagcatcgtaaagtgtgaagcagcctcttgaatggacatgccctgctgaagcattccgatcacgattccgaaaataatattgatcatcacaatgatgattccggcaatggcgtcaccttttacaaatttactggcaccgtccattgctccataaaagtctgcttctcttgccactttttcgcggcgatgcttcgcttcctgttcggtaatcatccctgcgtttaaatcagcatcaatactcatctgcttccccggcattgcgtccagcgtaaaccttgctgcaacctcggaaacacgttcagcaccttttgtaatgacgataaactgaataataataaggatgataaatacaacgagtccaactaatacatttccgccgacaacgaaatttccgaaagtctcgacgactttccctccttcaccgtgtgaaagaattgaacgggtagttgagacgttcaagcccaaacgaaatagggtcaaaagcagcaacagtgacggaaaaatcgaaaactgaagcgcttcctgcatattcattgtggtgagaagcacgatcaacgcaagagaaatattaataatgatcaaaatacttaacagccatggaggaaatggaatcaccagcatcgccacaatgaggacaacacttattaaaacggataaatctcttgttgacatgctgttttttctctccttttaaatcgaaaaattcaatatactttttgttttgttttatatacgtaagccagaatttctgctaaaactttaaaaaattcttccggcactgcctggtcaatttccacctgatcatataacgcacgggcaagcggtctgttttctaccatcatgacatcatgctctttagcaattttcctgatttttaacgccaggtggtcgacaccttttgcaacaatataaggagcgtccattttttcttcatcatatttcaaagcaatcgcatagtgagtcgggtttgtgataatgacatctgcttttggaacttcctgcatcatccgcctcatcgccatttcccgctgtctttgtttaattttagacttaataatcgggtcaccttcagattttttgtactcgtcttttatatcttgttttgacattttgatgtttttctcataatcaaatctctgatataaatagtcaagaccagcaagaattaataaagcgcctgcaccgcttagtcccatccacaaagtgagttttgaaacgaaagatagtgcctcttcgggtgtcaggagaggaagccggagaatttctccataatgcagccaaagcacagcaaaagccgcaaaaccgacgactacgattttcaaaattgatttaatcagctctacaatcgccctcatactgtatattcgtttaaagcctttgatcggatccagtttttcaagcttaggctgtatcacttcagcagaaaataagaacccaacctgcatatagttgcttacgactcctgcaacaagagcaacaagcaaaatcggtgcgagtattatgcccatatcctttaataagctgacaaacaatgtatgcacatttgattctgagagcttcattgtgagcgattcggtataaaatgtttctatgaatgacagcagcctgtctctcatatacggaccaattgcaataagcgaaaggaatattaccagtaaagaaacggcggtattgacatccgagcttttggctacctgccctttttttcgcgtatccttccgttttttcggagttgctttttctgtcttctctcccgcaaaaaactgcaggtcaactctaagcttcattaagaaacaccgaccaatgctaaaagattccgcatcgtttcaatcgttaaactgaaaacattccggacaacgacgaagataacggacatacatacaatgagcatgatgaaactgacagcgatctttaaagggagaccgaccacaaatacatttaactgcggaacagttcgagccacgatgcctaatgctaaatcaactagaaacaagctggccacaaccggcgctgacatttgaaaagcgataataaacattgcattaaagcttttcgcaataaaataggcaaacttttcatcgccgaaattcggaaatgcctgatcaactgaaatatactgaaagctgtagtaaataccatccagcaacaaatggtgggcattgacactcagcataaacaaaagtgccatcgtatagataaactggccaatcaacggactttgtgcaccggtttgcggatcaataacgtttgctattgaaaatcccatttgaaaatcaataaacgagccggcaatctgcactgcggcaatcatcatataagcaattaaacccagacataggccgaccaaagcttctttaaacgccaaaagcatatagtgctcatctatctccaaagagggcggtttatcaatggtgctgaaacaaatgaccgcaagaaaaaaagcaaaacctatgcgatgaacagctggcacatttcgatgtccaaatagcggaattgttacaaaaaaagcagagattctaataaaaaccaataaaaaagcaggaaataagtcaataattgaattcatctctacattaccctgcaaaacgatttaaattagaaaacagctctgttgtaaatgaaagaatcgtcgacagcatccacggaccaaaaaaaatgagagccaggagaaccgccacgattttcggaataaacgccaaagtctgttcctggatttgagttgtcgcctgaaatatgctgacaattaaaccgaccagtaaagcaatagccaataatggcccgctgatcatcagcgttacgtatacggctttttccgccatagaaattacaaattctgaactcacgtttagcacctaccctaaaagctctgaagcaaagatttcacaattaaataccagccgtctaccaaaacaaaaagtaatattttaaagggcagagaaatcataactggaggcagcatcatcattcccattgacatcaagacgctcgccactaccatatctataattaaaaaagggataaaaatcataaaacctatttgaaatgctgttttaagctccgatatggcaaaagccggaaccattgttgttaacggaatatcctttaatgattcaggtttatccattttcgcgtaattcataaacagcgccagatccttctgccttgtgtgtttactcataaattctttaatcggttcctcagctttcgtatacgcttcatccaagctgattttgttgtccattaatggggtcagcgcttctttattaatttctgaaaaagtaggagccatgataaaaaatgttaaaaacagcgcaagcccgataagaacctggtttgggggcatagattgcgtcgcaagtgaagttctgacaaatgacagaacaatgacgatgcgagtaaaacaagtcataagaatcaatattccaggcgccactgaaaatacagttaacaataatagtaatttaacagtcgaacttacgttttccggatcgcttgaactgaaaatatttataaactcattcatgatgacgtgggcctttcttctttccttcagaacggttttgttttaactcttcaagttgctcttttaatgcttttgaaaatgaaggcagtttttgctgcggctgatgttcagaactcttaagcggcttcacaaacttttgccactctattttgcttgacattgcctcttcatgctgactgagaatgacttcaatctctttttcatcctcaatttctttcagcagctggatcgtctctcctacaccgacgacgagcacacttttcccaaccttgatcaattgtatggatctgttctggccgaccgatgtgccgccaatattttcaacatattgaaaaggctttaggagccgatttcttttgttcatgagcttaaccagcccgtaaatcagcacgataacaaacaataaagcgaaaatcatctttacaaaatcaaaagctgagacagaaggagcagccgctccctccgtctcatcagcagtttttgttgttttttctttcttttgctctgattgatctgcagttttttcatctttcttttgaaaccattcgtttacagttgaattatcagagtctgccgcggcagcagcaatcggatgtacactcaataaaacgaaaaaacaaataaaaacgataaaatattgactctttttcaacagtcgtacaccctttaacttaatgttttgttgattgcttcaagcacacggtcagcttggaaaggtttcacaatgaaatccttagcgccggcctgaatggcatcaataaccattgattgctgtcccatagcagaacacatgatgattcttgcctgcgcatcaatttgtttaatttcttttaatgctgtaataccatccatttctggcatcgtgatatccatagtaacaaggtcaggtgaatgctctttatatttctctaccgcttgtgctccattttcagcttccgccacaacttcaaaaccatttttaactaaaatatctttaatcatcattctcataaatgctgcatcatctacaattaaaattctatgtgccataatctatctctctccttgtgtttcgttattttaaattattaatgcgctctgcctggcttaaaatgtcagtgactctcactccgaagttttcttcaatgacaacgacctcgcctttagcaacgatacgctgattaactaaaatatctacaggctcaccggctaatttatcaagctcgataatacttccggcagaaagctctaaaatctcttttacgcttctcttcgttctgccaagctcaacagtaatcgaaagcgggatatccaaaagcatatccagattatgaataggggcttgtacagcttcgtttggatcaaacgctgaaaattccaccggtgaaacctgaactggcgctgctttttttgctgttccctgcctttttgacggctgctgctgttgcttcggttcaatacgcggctctggcgtcacaggctctttcggctgttcgtatgtaacttcaggctgcaccgtttcttcttcctctgcactttctgagttcataaggcttgaaattaaatctttcgcaaatgtcaatgggtaaagctgcataatgctggagtctattaattctcccacctttaagttgaaagaaactttcaccagcatttcatcatcaggaatacggtctgtacccttttcttcagtaacatccagcaattcaacccgaggaggtgaaatatcaatttttttactgaatacagtagacattgatgtggcagccgatcccatcatttggttcattgcttcttgaaccgcacttaaatggatttcacccagtgaagggtccgcaccttttccgtctcccccgatcattaagtcagcaatgatcgccgcgtcactttgttccacgactaacaggttgcttccgctgaagccctccgtataattcacttcaatcgctacatacggttcaggaaacgcatcgctgattttacttcttggaatgaccgttacgcttggagtcgtaatatcgaccttttgatttaaaagcgttgaaagtgctgtcgcagaactgccgaatgaaatattaccgatttcaccgatcgcatcacgctccatttccgataagtcatctacttccggaacctctggctcatcaagcgtgctgccagtaccgttaagaagcgcgtcaatctcatcttgagataatctattattctccatcttgttcacctcttatgtcgtgatctaaaatttgcactgcctgttttcgattcacccggccggcttgtcctaaaaatttcggcttatctccgaccaatacagtaagaggatccgtgactgatttgtccaaagttatgcagtctccgacttctaaacttaaaaactcttctatcgtcagttcagatgtgccgagctcggccacgacaggtatttgtgctgtcatgatacgtttttcaagcgactttgtttcctcaggctttggctcatttcggtctgattgcatccaatagtggactgaaagcttcggtatgagcggctcgagtacgatatgcgggatacagagattaatgacaccgctgatttcaccaatttgagtattgagcgagatcaccacgactgtttcattaggagataccatctgaacaaattgcggattcacttcaaactcagtcatttccggttcaatatcagcaattgactgccaagcttctttataattacccagtgcattttcaaataaattagaaatgatttttgtttcaatttctgtcaaactgtcaaccttgttatgactgattccaatcccgcccatgacccgatccatcatcgtataagctatcgtggggttgacctccatcataattctgccttccatcggatggacatcaaatagattcagaatcgtcatgttcgggatcgatctgataaattcctcatacgggacctggtcaacagaactgacagatatgtgaatataggttctgagctgagcagaaaaatgagtggtaagaagtcttgcaaaattgtcatgaattctcgttaaactgcggatctgatccttagaaaaccgcagcgcacgtttgaaatcataaaccttgactttcttctctttttcttcttttttcagctcttcagcgtccatttcacctgttgatattgcagaaagcagtgcatctatttcattttgggagagaacttctcctgacattttcctcacctccgtattctgtcaaattatgctttattgcagattaaaggaggtaatatacactttttctacttttccttcttggaggtagctatttattttatcttttagttccttcttaaaggtttcttttcccttgtctccctcaatctgatcagcattcgtatcagcaagcagtgatataacagcgtctttcacttggaaatcacgtttctcaagttcttcttttgatttatcagaatcagtttcaagtttaatagcaagacggataatgttatcagactttaaatttgttgtgatctcttctacatcaacagaagacgcaacgatttcatcaatactttttttcgcttcacttttttcggactttccgcctaaaacaaaataagccgccgccccgagagcaccaattacgataagaataattagtaatatgatcattaactttttcttcattccggttcctctattccttgatccattgaaaatatttgtatttttcggtagaaagctgcgatcttttccagaacagcttcttcatcttcctttactacaaacttcttaccatttgacagagtaattgtagtatccggaaaacattcaatctgttcaataaatagcgcattcagtgtaaagggctgcccgttcaaacgggttactttaatcataaaacagcggagaagcgattactcgcctcccctccctccttaacgtttaaggttaaccagttcttgaaggatttcatcagatgttgtaataatttttgagtttgattggaatccgcgctgggctacgatcatttcagtaaattcgtcagttaaatcgacgttagacatttcgagaaatcctactttaagggaacctgttccgccatcaccgggctggttcgctgcactggccgtaccagagtttaaagattcacggtataagttgctcccgattttatccaatccatcactgttggcaaaagtcacaatcccgatttgtccgccgtcttgtgattgaccaccggcatcaacgatcgataccttgccatcagaaccgatagtgaaactttgtgcatcagtaggaattttaattgttccgccattcatatttaacacatggtagccatcacctgtaaccagagttccggtattatctaaatagaagttccctgctcttgtataagctgtcccgtcacctgtatcaattcggaagtaaccgtcgccgtcaattgctaaatcaagtgttcttcctgtactttgtgtcgcgcttgttgaatgaattgtatcaattgtgccagatgatgaacctaaaccgatttgcttagagtttgttccgccgattgttgcaccagcagcagaaccgccggcaatcgtttggcttaccatatctttaaaggtcacacggctctttttgaatcctactgtatttacgttggcaatattattgccgataacatcaagctttgtttgaaagtttttcataccgctgattccagaataaagtgaacgtaacataatatattcccccagatgtttttatttagatgattgtcccacagacatgacattcgcaggactgatctcggtcccatcatcaagaacgagataataatttcctttaaaatgtttaacagagcttactgtgcctgttttatctgttgcacttttaccatcagtccaagatacttcttttcccatccaatcaacatacgttgtaaacggatcttggttttcaacgaattgagtcattgtcgtattcagattcatcatttgctccaagcttgaaaaagtcgccatctggctgataaattctttatcgtcaaccgggttaagcggatcttggttttgaacttgagtcattaatatttttaaaaactcgtctttccccaagctgctgttgttcgtcgacacagtgttcgttttttcaggcagtttatattctgaacttatagaagtcattcttcttcctccatttcaaccatcgacacttcatcgagcagatcgccaaaatcatttgattgctttttctgtctttgctgtctctgcccctcttgctgctgtttctgttcatcagcaagctggccgtatatcggctgatccccgctttggaccggaagagtaaaacggtcaatttggacggccatattcggcaatgattgcttcagctgaggaagatgctgttcaagcaattcttttgctgattggctagatgctatgattttactctgaaacattccattttcatttgtcagcttgattgtgacaaatcctaaatgttcagggttcagccgaatagtgaaacttcccgtcgatctgccgaaaggcgtatatttcatctgcttccacgcattaatcacttgatcagccaccgtttttgtttcggtatttggtatatcagatgacatctgctgcagatcaagtgtttgtactcctcctatgctccgataacccgaaaacagcatttggagtcctgatttactatctacaggctgaatacttccagaaacatccgatgcatttttgctggataaactctgcgagagcggtgtgagaacacgcttcccaaagtcttgtgatgattcggatgatttcgataacaagaaggctttcagctggctttcagctaaactccattctttggtccctttttgaggaagcatagacatttgatccattaagctttgaaaacttttcagctctgacgctgtcatcgagtaaagttttgaacttgactcagctttagtgaatatttgctgtttaagatcctgaattatttgttgagatacacccttcttttctaatgcagaaaggaattgatctccattttggtaaatggcatgagcttcattgccattcccgcgatcagtcagattattcccttctacgagctggctaatgaacatctggatatagataagctctttagcaggctcggatacttcattttcatgatttgattgctctgtatcagacttcagtgctccattaatgtcagaagcagaatcattggcactcagagccgttttagcttctgaaaagattttctccgtatctgtgagcaactggtccgtcccgcctgacatttttgatttaactgcttgcaaaagattttgcaacatttgcagagcattcgcatccaattgtttccctgtcagtttgcttaatgtttgcaaaagattcgcattttgtttgtcttgatcttcaggacttgcatttagccattcaccgatctttttaagcgcatctgctaaaagctgatcttcggaattaggagtaccctttccttgttctgagagttccttcaatccagcctcagacataagccagttttgaaaaactccttggctacttttcatgtttttagcggcagaacccgttgtggtttgcagcaaaggtcccgctaattcaagcagcttcacctttcattccccctattcttggctggcagcaattttttctgtataggttgctgcttgctcaggagtcattttcgccaatatgtcagcaagctgctttttgcttaggccattcaatattttcagtgcttcttgctcctttaattgggcaataattttagcagcctttccgctgtccatgcttttgtacacactgatcactttgtcattttcagaagaagctttcgagtctgctgatccttcagtatgatcttctgatgactttttttgatcctcagccgtcttttcaagtgaacggatcttttgattgagcctatcgatttctgatttacttgtttctaaatctttattcaatatactgatttcacttttttgatccttaatggtcttttccagagctgccgtattactgctatccttacttgatgctgcgccttttttattttcggtttcagggaccaattctttaagaaccggcgtttttgccgcagcatcctgtatcggctttatgacattgataccagcagcccaaagaacaatcccccctgcgattaatagaaacatcagcgggaggataatgataagcaaaaccgaacggaacttacctgattctttctttttgccggacattacattcgctcctaatggccttgaatcataaactgcttaatcgaaatatcgtccatttctttcatttctgcagctttatcttcaagagcaaacattttaaactgtttttcacgcattttttcaaactttttcacttcaatgtttttctctgtcaaaatttcttgtttttgattcatttgatttcttttcataatgacaagcttttgatagtgatagatcgtattatcaagatttgagacaaattgttggtagtgcctcatttcttgtacactcatgccgctttttaatttcttttccttattttgttccagcaattcctttttgctcatattctcatataatttttcagcaacgttttcaaattcagaaactgattgctgatactcggataaggattggtctttttcattttcttttagttccagcagcttttggaatctaaattgataagccacgtttattcctcatttcctgtcaaactagttaatacagcaatgctttcttccaataaagccggttcgtctgttccctgctttaaaaattgaataagctgcggataaaattgtatcgcttcatcaatttctctggatgatcctcttttgtaagctccgatattaatgagatcttccgaattttgatatgtcgataaaagttcacggaatttatttgccgcatccagatgctgttttgttgaaatgtttgacatcaccctgctgatgctttttagtacgttaactgcaggaaactggcctttattggcaagcgccctgtccaacacaatatgtccgtctaaaattccgcgtacagtatcggcaatcggctcattcatgtcatccccgtctaccaacactgtataaaatgccgtaatggttccatgctcgtttgcacctgttcgttctagtaaacgaggtaaaatagcgaacactgaaggtgtataaccttttgtcgtcggaggctctcctgcagccagtccaatctctcgctgcgccattgccacccttgtaacagaatccatcataaacatgacattttggcctttatctcggaaatactcggcaatggcagtcgctgtatatgccgctttcaatctcattaatgctggctggtctgaggtggcaacgactacaatcgatcgtttcagcccctctttccccagatctttttcaataaactcccgaacctctcgtccgcgttctccgacaagtgcaatgacgtttaagtcagcctctgtctgcttggcgatcatccccattaaggtgctttttccaacaccgcttcctgcaaaaattccaatccgctggcctttaccgactgtcagcaagctgtcaattgatctgactccaacacccatcttttcacggataggcggccgtttcatcgggttgggcggtgattgctccgttgatacaggcgaaagccctttcggcagaagctttccgtcaagcggttctccaaaagcatcgatgacttgtccgatcagtccggtcccaactttaacccgaagtgattccccagtagcttctacaatgctgccaggtgcaatgctcgcagcctctaaataaggcataagcaaaatattttcttcctggaagccgactacctcagctttaatgactttcccagattgtccttttgcataaatcaggcacacgtcgccaattgagcttgctggcccttttgattcaatcatcaggccgattacccgcttgacttttccgtaccgtttatacgagtctgtcatttctatacaatctatcagactctgtgtcttcattcagctgcacctgcttccagcgctgtcagaagtttatctttcaattgcatcaattgtgtgtcaacactcgcatctaccctgccaaaaggagtttcaatataacaggttcctttttgagctttttcatcagcatatatgccaagccggcattctttataaagaagctgctggatttcatctttttgctgaaagattgtctcatagtaatatggatcaacataaattgatatatcgtcatattccttcacttcgtttataacctgttgtacaagcaggaggaaagcctctttatcatcagacttttgctgccaaactttttttgctagggcaacggcaagctcaacgatttcttcattagcgtcttcaagcttgtcctcaacagcttttctggacatttcagttatactgttcgcttggccgatcagttcggcatactgttgcaatgcctcagctttgcccaacgctactccttgttcaaagccctcggtttttgcttcttcaataagcttctgtttttcagccgcccaatcgtttttctcctgctcgatttgacggcgaatattttctatatgactgtttgcctgctcagaaatccggtcagcttcctctttcactcgggccataagcgcctccgagttctcttcagcctgcaaaaggtgagaatgatcaatacgcacctcttgtatagaaagttttcttttttccttttgtggagaaatagatgattcttgtttaatgatattagacaataatatcatcccctccgcctcttgctatcacaatttcaccggcttcttcaagctttctgacgatgcttacaattctcgattgtgcttcttctacatctttcaagcgtacagggcccataaattccatttcttctttgaaggtttcaaccatacgctgtgacatattgttgaacacaatttctttgacttcctcgcttgcaacctttaatgaaaggagcaaatcgtcgttctcaacatcgcgaatgactctctgaattgcacggttatcaagtgtgacaatatcttcgaagacaaacatccgctttttaatctcttcagcaagatcgggatcctgaatttccaatgaatccaagatcgtcttctctgtccctctgtctaccccgtttaacacttccacaacagcttcaattccgcctgtttgtgtataatcctgagtaaatgcagaagataatttttgttccagaatccgttctacctcgttaattatttctggagacgttctatccatgaccgcgattcttctcgcaacctcagcctgcacttcagggttcagctcggataaaatttgcccggcctgcactggatctaaataagacaagattaacgccatcgtctgcggatgctcttgctggataaaattcaaaatttgttctggctccgcttttctggcaaaatcaaatggtttaacctgcaaagaagaagtcagcctgtttagaatgttctccgccttatcctctccaagcgccttttccagaacttgtcttgcatagcttaaaccgccttgagaaatataatcttgcgcaatggctatattatgaaattcttctatgatttcatcctttttttgatgatcgacgcttcgaacacctgatatttccagagtaagcctttcaatttcttcatcggttaagtgcttatagacagaagctgacacatctaaccccaaggaaatcatgagaatggctgctttttgttttcctgtaagcttatcttgatcacgtctcgccatttctaattcctcctaatcctcggccagccagcttctcagcagttttgcaaaatcttccggcttgtctttcgccatcttttcaagctgttttcgtctgactgattccgctgtttcattttcctcttcgttgatatcaggcaaattgattggttcttgaggaacctcatactcatattcctcaaattcatcctcttgcgcccgtttctttctgataagcataatgatcagaacaatgatcgctgcgattaaaacaccgcctacaatatatgcccacagcgggatacctgaggatttttccgtatttgtatccaaattgactttgccgtcgaatggctgaacggagacaacaatcttattattgatatcagcatcagataaattctggttttgcgtttcatctttatccaaagatgttctgactacagttgaaaggattttttgtatttcatcctgtctttcagttgatagcgacgctgtgtttttggcatcaggcggctctaccattacttgaatccctaaatctctgaccttataaggactttcagcgatttctttatgaattcggttaacctcgtaattgattttgttgctgtttttttcgtagtttccgctttcggtattttcaccgtcagccttataatttgttacatcttcctcgccggttccggcagttccgccgttggctgcaccgtcgccctgatatgtttcagataccttttcagcgctgactgcaatgccttccatgttttctttatccacaggttcgacaatgtcttctgtccgattttcttttgtgaaatcaatgtctgctgtaacggagacaacgactttatcttggcccatcatcgtacccagcagtgactgtacatgtttttgaatgtctttttcaacttgagacttaattccttgctgagaagaataactatccgcgtaggaccctgcatcgctgtctgatttgtcgtagtatgtagaattttggtccatgatgacgatgttatcttcttttaggtttggcacgcttttagataccagatgatataatccgttgatttggctttgatcaagtgtataacccggttgaatctgcagaacgattgatgcagatgctgcagattgctcctcaccgacaaacacagcgtctttcgggagattaatcattacttttgaatttttaataccgtccatttcattgatcaagtttgacagttctgtctgtgtagctttcactttcaccatatcaaactcattgtctgtcaaaccaaagccggcattctgtccaaaaaacgaataatcaattgatcccgttttaggaagtccttctgcagccatctgcactttcaaagaatcaacctgatcctccggaacactaatcactgtaccgccattcgaaagttcgtttggaactttttttgcatccaattcttttttgatttgtcctgcttcttcagcagacaaatctttgtacagcggcgccattttagaatttgaagcaaaaacactaataataattccaataataataattgccgctaaagcactaaccattaaaatcttttgtagtttagatctatttttccaaaactcactcgttttgtttttcatttgcattagagtacgattcatgttaacccccggtcattccactctttctctaaatcgtcagaccccctacatttgcattctcataatctcctgataagcttccacagctttattgcggaactctgttgctgcagttagagagatgctagctttttgagcagcgatcatgacctcatcaagatttacatcttttcctgcagccaaggcattagtcatgttgtcagaagctacttgggactcatttaacgaactaatagagttttttaaaagctccgaaaagcttgtttgatttgaagaatctgttttttggctattgtttacttgattcgttgcattttgagtgttttgagtattttgaacctgaaaaggagaaattgcattaatcacattcattcacctactttccgatttctaacgccttcatcagcattccctttgtggcattcatcgccgtgacattcgcctcatatgatctggtgctgctgacaagatcaaccatttcctttaatggatcaacattaggcttttgtacatatccatcagcgtttgcatcagggtctgtcggatcatagacaagattaaaatccgaatcatcctccgtaatttttgaaaccttcacaccgtttccagcattcccgcttccgctcatttgagaattgagaatggaagagaacgattcaccttttgactgaagggagaccatttttcttctgtaaggcacccactctccattcacctgcttagctcttgtcgtatccatatttgctaagttagatgatacaacgtccattctgactcgctgagctgttaaagccgatgctgaaacatttaagctatgaaaagctgtcatcattttcctcctgttaatacggtcttcagcgaattaaatttaccgttcattctttcaaccaaagcttgatagttgatttgattttgcgccaattctgtcatctctttgtcaacatcaacattgtttccgttttgctgatacgatgtatctccgctcgcaacaattgaataattcgaatcagcatcagaaaaatcaacatgacgatagtctgtttttatcgcttcaagacgcgaagattcttgatctaataaattttggaaagagactttttttgccttatagttcggtgtatctatattggcgatattattagttatgactttttgcttaatatccgctctactcaaggcattttcaagattttgtatcgttccagaaaataagctcaaatccacttacctccatttcagtttttttcaccctcaatatccttgtcgagaattgtaaaactatatgcttattgtaagaaataacaggcataaagtctatgaagttcgtgtaaaaaaatgtcctcacaattatctattttacaactaggtataaagtcctagattgttagaactacatttctcaccttgatataagcctgaaaatagcagaatttctgttttttctcctttcttttcggcatttttgaaactttttgaagaaaaatgcaaaatttattaaaattattacatagaaagactttcaacccaggaaataaagcttattgatttcctttatttgaaataaaaaaagaaccctcaaaaagggttctttttgtgattaatgagattttagattttctaattcaattaagaatttgttgtttagtaccttgatataagtacctttcattcctaatgatctagactcgataacaccggcgctctccagctttctgagtgcgttcacaataacagaacgggtaatgccgacacggtcagcaattttacttgcaacaagaagaccttcgtttccgtcaagctcctcaaaaatgtgctcaattgcttcaagctcactgtaagaaagcgagctgatagccatttgtacgacagctttgcttcttgcttcctcttcaatttcttctgctttttctcttaggatttccattccgacaactgttgcgccgtattctgctagaattaagtcatcgtcattgaattgatcttgtaaacgtgaaagaataagtgttcctaatctttccccgcctccgatgatcggcacaattgttgttaaaccagcttggaacagatctctgttctcaacagggaaagcagtatattcactattaatatccaagttagaagatgtttcagggacattaaacagatttttcgtatactcttcagggaattgacgatcctcaagcatttttttcatacgatcattttcaatttgctggttaatagaatacccaaggagtttccctctgcggcttacaacgaaaatattggaatcaattacatcccgcagcgtctctgccatttccttgaagtttaccggtttccctgctgcagcttgcagcatggagttaataattcttgttttttgtaataaagccatgataaataatcctcctaaacattcctcatattaaatttttcacaatataaattgacttaaatctttgtttttggctatcgttccgagcttttcttcgacatactgtggtgtaatcgttattttctccatcgttacatctggagcttcaaacgacaaatcttctaataggcgttcaagtattgtatgaaggcgtctcgcaccgatattatctgtgtcctggttcacatgataagcaacttcagcaatcttatgaatagcttcgtcagaaaattcaagagatataccttctgtctgcaataatgcctgatattgtttcagcagcgcattatccggctcaaccaaaattctcacgaagtcgtctaccgtgagtttgttcagttctacacgaatcgggaaacgcccctgcagctcaggaatcaaatcagacggtttggccatatgaaacgctcctgctgcaataaataatacatggtctgtttttacagaaccatattttgtgacaacggttgagccctcaacaatcggcagaatatcccgctgaacgccttctcttgaaacatcggcagaagaagatgcaccgccgttctttgcgattttatcaatctcatcgataaagataatcccgctctcttctgctctctgaacagcttcctggctgacttcatccatatcgatgagtttgcttgcttcttcattcgtcaggacttttctggcttctctgactgtcattttgcgccgtttctttttctttggcattaatccgctcagcgcatcctgcatgttcatacccatctgctccatacccgagccctgcagcatgtcaaacatagaaggctgctgctcttcgacttctactgttacatagtagtcttcgagctctcctaaagccagctgatgcgccattcgttttcttttttcttcgatgtttgcttcttcctggctctccgcctcatcttcaccattcggctggctgcctccaaaaaacatttcaaacggatttttaacgccagattgttttttcttcccaggaactaacagacgaacaatgcgtttgtttgcattttcttctgcctgttcctttacttcattcattttctcttctttgataagacgaacagaagtctccacaagatctctgaccattgattcaacatctctgcctacatagccgacttcggtaaatttagtagcttcaattttgataaatggcgcacctgaaagcttagcgattcgtctggcaatttcagttttcccgacgccggtaggacccatcattaaaatgtttttcggaacgacctcgtccttcagcttttcatccagaagacttcttctatagcggtttcttaatgccacggcgacagcttttttcgcattttgctgaccgacaatatattggtctaaccgatctacaatctgtctaggagttaacggttttttttccatgcgcctcaagtcctttctattcaagctcttccagtatgatttgatcgttcgtgtaaacacaaatttcgcctgctgtttctaacgcgactctggcaatctcacttgcagacatgctttcaccggcatgctttttcagtgctcttcccgctgccaaagcgtaattgcctcctgatccaatcgcgagaatgccgtcatctggttcgatcacctcgcctgttcccgatacgagaagcaaagtatcctgattcataacaatcagcatggcttcgagctttcttagcactttatcactgcgccattccttcgcaagctcaacagccgcccgttttaagttgccgttatattcttcaagcttagcttcaaacttttcgaataaagtgaaagcgtctgcaacagatcccgcaaagccagcaagaactttgccgttaaacagttttctcactttccgtgccgtgtgtttcatgacaacagcctgaccaaatgttacttggccgtctccggacatagcgcttcgtcctttatgctgtactgcaaatattgtggtcgcatgaaaagatgacataaagggcctcctttaatttttcttaaatgctcttggatggtgagacatatatgtgtttctcaacatttccttcgaaacgtgcgtgtatatctgtgtagaagacagattggaatgcccgagcagttcttgaacgcttctcaaatccgctccttcatttaacagatgcgtggcgaacgtatgtcgaagcatatgcggatggatatgtaaagtgcttgacgctttttgaacaagcccgcttaaaatatgtctgatgccacgggctgtaagcggtccgcctctttgatttacgaataatagatcatgaggttcttttgccttcatcagcaagcactgtcttccgctattcatgtataccttcaacgcttcgcgggcataagacccaaaggggatatagcgctgcttcttgcctttgccgtgaacaagcacagtgtccataaataaatcaacgtcgttaatagttatggaacagcattcactgaccctcattccggtggcatagagcagctctaacagcgcttgatccctcattccggccggctggcttatatctgaaacttcaaacagctcctcaagctctttttgatatagaaacttcggtatccgtttctcctgttttggcagatgaacaagctgaaacggattttcttcaataagcttttcccgcatcagaaacttataaaagcttcttaatgcagatatctttttgcttattgttcttctcgataaacctttttcataggcttctgtcaaaaaaatcctagtatcttgatatgcagcttcttcaaatccatttataccttgaacgcgcaggaaagtctcgaattcttcaattgaatccacataattcacaatagtatattgtgaataatttttttcaatttgtaaatattcaacgaataactttacgaaattcttaacattctccatgcctaatacctccccaggaagggcttttaaatggtatcacaaatcgcgctcaggttgcaatcaatacctatattgttttcgaaattgtttgaattgtttcaatcgcacggttcgcgtattgttcatttcgttcttttttatttttaattttaactggcaattctttcaaaagcccaaagtttgcattcatcggctggaagttcttctggtttgttgttgtaatataatgtgccatactgccaattgctgtttcctgagggaagatcacaagctcttctcccaatacaagcttcgccgcattaatgcctgctacaagtcctgaggcagctgattccacatatccttctactcccgtcatttggcctgcaaagaacagatcactgcggtttttaaattgataagtcggctttaacaggctaggagagttaataaatgtgtttctatgcatcacgccatatctgacgatttctacattttcaagtcctggaatcaacttgagaacttccttttggtctccccattttaaatgagtctggaatcctacaatattataaagtgttcccgcagcatcatcctgtctgagctgaacgacggcataagggcgttttcctgtaacaggatgctctagaccaaccggtttcatcggaccgaaaagcattgttttcttaccccgttttgccatgacttcaatcggcatgcagccttcaaagaaaatctctttttcaaattcttttaacggcactgtttctgctgatgttaatgcttcatgaaaacggtcaaactcttcttctgtcatcgggcagttcaaatatgctgcttcacctttatcataacgggatttcagatacactttatccatatcaaggctgtctttttctacaatcggcgccgctgcgtcataaaaatataaatagtcctctccagtcagctccttcagctgggcagacagcgattcagatgttaacggacccgttgcgatgatagtagggccttcaggaatttcagtcacttcttcattaataacggttacgtttggatgatttttcacccgatttgtcacacttgcggcaaattcatgacggtctactgcaagagcgcccccggcaggcaccgaacattcgtcagccgcagcgataatagctgaatcaagtgcacgcatttcttcctttaatacaccgacagcgttagcaagcgtattagagcgaagagagttgctgcagacaagttcagcaaatttatctgtatggtgcgcaggcgtttgtttaactggccgcatttcatacaatttgacttgaatcccccgtttggcaagctgccatgctgcttcacttcctgcgagtccggctccgattacattcactgtttgttggttcatctttcacatctcctagtttattattcaaggccttcttttaacacacaaagaaggtgagcaagaccctgctcaccgctacttctgtggttcttccttataatcgcattccacgcattggacttgtatgccttttttgagttttttctcgacgagcatttttccgcatttcgggcattttcgttcaattggtttgtcccatgatacgaattcacagtccggataacggtcacagccgtaaaacacccgtttctttttcgattttcgctcaacaatgtttccttctccgcagctcgggcacttcacaccaatttgtttcacaatcggtttcgtgttccggcagtcagggaagttggagcaagctaagaatttaccgtaccgtcccattttatataccattggagaactgcacaattcacaatcctctccagcatactctggttcaatctcaacttccttcatttccgattcggcttttttcacgcgtttttcaaaatcggtgtagaaattatcgataatcttgacccattcggtatttccttcttcaacatgatcaagatctctctccattttagctgtaaactcaacgttaatgatctcagggaaaaactccatgatcaagtcaagaacgatctgacctaattcagtcggaacgaaacgtttattatccaatgccacgtagccgcgccgctgaatagtatcaagtgtcggagcatatgtggatggacggccgataccgcgttcttcaagggttttaacaagccgggcctcagtatatcgcggaggcggctgggtaaaatgctgctcaggttctatatcttttgataataccgtgtcgccttcttgcaagtcaggcagcatccggtctttttcttccatttgatcgtcttttccttcaacatacaccttcataaacccggaaaacttgactttacttccatttgcacgaaatgtcaaaccgttgtttgtcaggtcgacactcattgtatcgagaacagccggtgccatttggctggcaacaaaacgctcccaaattaatttatacagtctcatttggtctctgccgaggactgcttttaattcacttggttttctaagaactgaagtcggccgaattgcttcgtgggcatcctgggcgttttcattctttttcgcaggcttccgttttccgcctaggaactcttttccataagtctgatcaataaatgcagctgcttcatcaacagccgtatttgaaatacgggttgaatccgttctcatatacgtgatcagaccaaccgttccttctcttcctaaatcaattccttcatataattgctgtgcaatcatcatcgttttcttcgctctgaaattgagcttgcgagccgcttcctgctgcagggtagaagtggtaaaaggcaaagcaggattacgtttgcgttcctttttggttactttttcaactgtatattgattccctttgagctgagaaagaatctcttttacatcagcttcactatttaaaggaagttttttgccgtttttcccgaaaaagctcgcttcaaaggtttcttgaccttttaagaacgtaccgtcaattgtccaatattcctcaggcttaaagtcgttaatctctttttcacggtcaataatcaaacggagggcaacggattgcacgcgtcctgcgctaagcccttttttgacttttttccataagattggactgattttatatccgacaagcctgtctaaaatacgtctcgcttgctgtgcatccactaaatccatattgatcatgcggggatgcttaaacgattccttaatagcgtcttttgtaatttcgttaaacaccacacggcagtctgagttgagatctaaatcaagactgtgtgccaaatgccatgcaatcgcttccccttctctgtcggggtcggctgcaagatacacttttttggcttttttcgcagccgttttcagatcttttaataccgggcctttacctcgaatggtaatatatttcggttcaaaattctgttctatgtcaactcccatttgactttttggaagatcccggacatgtcccattgatgcttttactttatattttttacctaagtaacgttcaatcgttttcgccttagcgggcgattccacgatgactagataatcagacattttcatccccctcaagaggtgttctctctcttttcaagatatttcaattttatttttgcagctgtctttatttggctttcaacatttcattctttatcatgaacgtcattaattaaatagaaaacaatatgcaactttaaatcctcactattattaaatattacaataccgtttgtcaaacgataattcaaaagggttccgtatattgaacgtttctctcaggaagttcctcgaaaatatcctctgctgaccatatggctttagccccctgctggatcagttttataggacctccggcgtaagggtcaaacaatgaaccgggtacggcaaatacctctctcccttgttccaatgcttgataggcagtaatcagcgaaccgcttttttctttgccctgaacgacaataacgccttcacttagtccgctgataatacggtttctcatagggaaatgccatttttggggtttagtttcaggtgggtgctctgacagcaggatatggtgtttagccatgtgatctgctaactgaaggttttctcggggataaatgtgttgaaatccgcctgcaatgacgccaattgtccgtcccttcgccttaatacttgcagcatgggacattccgtctatcccagacgccagtccgctgacaatcacccaacctttacgacagatctcttttgtaagatgattgacaacttgtttcccataagctgttggatttcttgtccctacaattccaatttttctccctttcgaaagaagagtcatatcaccttttgcaaacagtacggcagggggatcataaatgcttttaagccagaaaggatattgctttgaagaaatagggatggtgttaatgccttgctcacgataagcagcaagtacacgcgggagctttggataaaattgttctatttcgttttttaatgcagctgcttttatttgatcacgagtaaccgtttgtaacacgggtgatgtcagcgacatagacggatcggctttccaccattttaatagaagggatggggataataattgattgattctgcaaatcgttaggcaggcagcggcctgatccaatagattgacctccttttgttagaaaaagcaggaacagccttgacggctgtcccttttttattaatgcgttttacaagtttcgaacaagttcttctctttcagcaccttgattaaggtttcacccatgacagaaggtgtctctgcaacttcgattccgcatgcattaagggttttgattttttcatcagctgtcccttttccgccggaaataatggcgcctgcatgccccatgcgcttcccaggaggtgctgttttaccgccgataaaaccgactaccggttttgtcatgttggcttttacccactctgccgcttcctcttcggcagtaccgccgatttcgccaatcatgatgactgcgtgtgtgtcaggatcttcgttaaacgcttttaaaacgtcaataaagtttgttccatttacagggtcgccaccgattccaacagctgtagattgccctacacccgcttctgagagctggtgcaccgcttcgtatgttaatgttcctgaacgtgatacaacgcctacatgaccctttttatggatgtatccgggcataatgccgattttacattcttcaggcgtaatgacaccaggacagttcggccctatcagtctcgttttcttgccttccatgaagcgtttgaccttcaccatatccaaaaccgggatatgttctgtgatacaaatcacgagatcaagctccgcatctaccgcttccataatcgcatcagctgcaaacggtgcgggcacatatataacagacgcgttagcgccggttgtttgaactgcttcagccactgtattaaatacaggaacaccttccgcttctgttccgccttttccaggtgttacaccgccaacgatatttgtgccgtattcaagcatctgcttcgtatgaaataaagcggtagaacctgtaatcccttgcacaataactcttgtatctttattaatgaaaacactcattatttggtcccctgcctttcattctttcttaaactaaggatacgattttctgcgcgccgtcagccattgattccgcagatgtaatgtttaatcctgattcactaaggattttcttccctagatccacgtttgtgccttcaagacggacgacaagcggcaatgtcaaaccaacttgtctagtcgcttcaacaaccccttctgcgatgacatcacatttcataatgccgccgaaaatgttgacaaaaatccctttaacgttttgatcagaaagaatgattttaaatgcttccgtgactttttccgcggttgcaccgccgcccacatcaaggaagttggccggttctcctccataatgcttgataatatccatcgtggacattgcaagccccgcgccgtttaccatacagccgatatttccatcaagggaaatgtagcttagatcatatttggacgcttcaatttctttcggatcttcttcatccaaatctctgtattccataatgtccttttgtcggtacaacgcattgctgtcaaaattcaattttgcatcaagcgccatcacatttccgtcgccggtaacaacaagcggattgatttcggcgattgagcaatctttctcaacaaacgctttatatagtccaagcataaatttagcagcttttcccacgagctcttttggaatattaatagcgaatgcaatttctctggcttgatagccttgaaggccgacagccggatcaatgacagcttttttgattttttccggtgttttctccgcaacctcttcaatttccgttccgccttcttcagaagccatcaaaacgattcttgaagtggcgcggtcaagcactagaccgatgtaatattcttttttaatatcgcagccttcttcaataagtaagcgttttattacttggccgtccggacccgtctgatgtgtaactagggtcttccctaatagttcttcggcatacgcttttacttcgtctaatgattttgctatttttaccccaccagctttgcctcgaccgccagcatgaatttgagcctttacgacataaaccgagctggataagctctttgcactctcaactgcttcttctgctgtaaaagccactttaccttcaggaacagataccccatattttctgaggacttcttttccctggtactcatggatattcatttcccatcctcctaacttatgtaacaaaactaaaatagactgcgctttcattctataataatactggaagaattgtctacagttcgatgcaaaatcttttaatccttctaaacattcaaacttttactttattaaaaacataaatttcaaaggaggatggggaatattttagctattttttgttttttacgctttcgtccaatttgtaaatgaatgaaaaaatctcggctaccgtttcataaagagcttcagggatttgatcatctaccgtcaaatggcgcattaattcgacaagggtccgatcttcttgaatcgggacccctgcttttttcgcttctttgataatgttgtcagctacatggcccttccctgtggcaatcactctcggcgccttgtctttttgttcgtcataatggagagcaacagcttttctgatcggtgtctgctctttcatattttcacatccacttcctgatcactgatacttgttatatattgatcgattgaagccttttcttcggtgtgaaccctttttttagcgtttacccctgaaaggctgtaccccatttcctttagcccctgtttaagcgcgggcaccatcggatcgatcgcagcctgcagctcgaaatcagtctctattgtaatggtcatgactttttgttgtaccaagcaatcaacgacggtttcttttagtgtatcaagctgcagcaaaaacaaaaggcggcaatgggaaggatcaagctttccatccgcttctttctttcctttaaacagaacagtcatgtcctgaacccctgacttcgaaaacatcggaaatgacattacaatttggctgtatgatggatggtcctgctgcatgaaaagctggccatttaatttatgaaaaagctgatcggcttcttgtttgactggttcggctacctcatgcgatgctcttaaggcagaaagagccagcttgatggattgcatttcgccagatgtgactgcgcttccttgttcaaacgctttaatgaacgcaacctcgtcccttgcgccgattgccgttttcactttggataagaaagaaagaacatctgccttatccgccaaatggggtgctgtctgctgaacagcctttaaaaagacttcggcttcctggtctgtgacttgtgccgcttgtaaaacagctgaagctgcaagtgacttactatcacccgatgaagcagccgctttaatccaatttgctgcttctttcacaatttggagactgtttttttcagcagattccgtcagcttcaccagcagctggcgggcttctttaattggaatgtctgctgctgttttaacaagctcttcttgtatgcttccctgttctgctgtgtgatttgcaatcggcaggctggcttttccgggggagccagctggtgtgctaagctccctgcttccagctgtattcgccggagaaggtgctttcgtattgtcggttaaagaaataagcttatcaattagccgttctgcatggacatcgatttcactatttaaaagcaccgtaactgcttcctttagctttgacatcatttggctctgctgagggttttggtcgattgcctgtagcagctgggatacgtgctgatgcaacggaacaggcgatttcacagcgtgaacaccattcaaaatctcggagtgaatgggaagatcacgctttaaagcgaagagaaccgtttcaactgctttttttgtgtcttgcgaaggcagcgtgtccatccagcggacagctgttttgatatcattttctgttacgggtgttttgctcttcagcatcgctcctgtcatcatgagagctgcgtttgacgtcttcactgacatggcatttaaaagcttgccagctgcatcctgaatggttttaggattttgatcaaagctttgaacgacctgaagacggcctgtttgctctgccgtttttttttcgtaggaaaaccaatagtatgcctgaggacgaagctgggtttcaagttttccctgaacagtttgattgccgacttggatcagggcatgctgatctcctagtaaacgaagcacttttcctaagaggagacgcttctccccgtttagcgcttcgtttacttttgatgtttcctgcgggacggctgtacgcccgaaaaggtgctgcagcgccttttgcacatcatttcgtatgttcattttaaataggtgcctccttgtccatggtgatttatctgaaagattgaacaggagcgaaagttttgcggtgcaattcagttgggccgtatgcagcgagagcttccaaatgttcttttgtcccatagcctttatttttttcaaagccgtacatgggatacgtttcggcataagcgctcatcattcggtccctcgtcacttttgcgatacacgcacctgccgcaatagacacgcttttggcatcgccttttataattgacgcctgagccgtgtcgaggggaagtgtcattgcgtcaacaagcaaataatcaggtgtacccgacaaatcttgtatcgctttcaccattgccatttttgaagcttcatatatattgatctcatcaatcacagtagcttctacaattcctatcccgaccgccagtgcttccttcataataagctcgtaatattcctcgcgttttttctctgaaagctttttggagtctgtcagcccaagtatttcacattcctctggaaggatgactgcgctggcgacaactggtcctgccaatggcccccggccgacctcgtcaacacctgcaatcaagcgaaatcccttgtttcttgccagcctttcataggaagtcatattcacccattgttctttcagcgctttttctttcgcttgctttttaagccattgctctacaagcgtttgaacgctttttctcgggtcgttttcgcattgggcaataaatgggtcttgtgcatccttcacttcctgcaaacggtctttaatgtcctttacggttaatgtattcactttctcttctcccttactgtatgtatcggttcagccaagaaaaaataaagacccgcatttctgcgcgcctttacatcgtcggctgttcaaatgacagcctgccgaacttttcagtgcgaatatcgcgaatgatgacttcagtcgtcttatcgtagttgatgagcccaccgctcatgagacagccccgcttttcacctattgcatcaaacagctcggcaatgtcctctgggatctcatcaaggccataacgctctttaagccgttctgggtaatgttcttcgagaaaacgaagaccaaacacggccacgtcctgcaaattaataatcgagtctttaatagccccggtgactgccagtctcaaaccgacaagctcatcctcaaatttaggccacaaaattcccggtgtatctaatagctctaattctttcccaactttgacccactgttgagaggtcgtaataccaggtctgtctcccgtttttgctatgtttttctttgcaagccggttgatgagcgttgattttccgacgtttggaatgccgataatcaaagcgcgaatcgctctcggcttcacacctttcgcacgcatccggtcaaatttttcttggaggatctcttttgatgcaggcacaatttgatttaacccttgtccatttacagaattaatagacagagagcggatcccctgcttctcaaagtgctctttccaccgctgtgtaactgccgcatctgctttgtcagccttgtttaacagcataattcgcggcttgttttttagaatatcttcaatcattgggtttcttgatgacattggaattctggcatctaccaattcatatacgatatcgattaattttaatttttcggttacttcccttcttgcttttgccatatggcccgggaaccattgaattgtcatgtgacacgaacaccgcctttatcttcagtatgcatgattcattgttgtcctttatgtattttacgatgcctgtccggcattttcaaattctgtataaaaaaagagcttgttacaggtaacaagctcttttcgttcgttatcattatcgtctgatctctttaatacgagccgcttttccgcgaagttcacgcaggtagtaaagtttagcacggcgtactttaccgtaacgtacaacttcgattttcgcgatttttggtgtgtgtactgggaaagtacgttcaacgccaacaccgtaagaaatcttacgaactgtgaacgtttcgctgattccaccaccacgacgcttaatcacaacaccttcaaagatctggatacgctcacggttaccctcaacaactttaacgtgtacacgtaaagtgtcaccaggacggaacgcaggaagatcagtacgaagctgttcttttgtgatatcttcaattagtttttgcatcgttttcaactccttccaacagatgctcttggccacaaaaaccggcacagcggaacatcgttttcaagcttgcagcggataagcccgcttaagccacaagtagtatcttatcacaatttcatagcctatgcaataaaatctattctttttcccattcagaaatccactttctttgctgctctgtaagcgggtagtctttcaacagatccggacgtcttaggtaggtccttctgatcgattctttattccgccattcttcaatttttgcatggtttcctgacaagagtgtttcaggcacttttaaacctttgtaatctgccggtcttgtataatgcgggtgctctaaaagtccggtgctgaaggaatcctcaatatgggaagcctctttacccagtacacccggaagcagtctgaccacactgtctgcgatcatcattgcagggagctcaccgcccgtcagaacaaaatcgccaattgatatttcatccgttaccaagtgctcgcgaatgcgttcatcatagccttcatagtggccgcaaatgaacagcaaatgctcttcctttgctaattgctcggcttttttttgggtaaaacgctcaccttgcgggcatacgaggataatacgcggagcagcggctgcctttgatgtcaggtcctcgaccgcgtcaaaaacaggctgaggcttgagaaccatgcctgccccgccgccataaggataatcatcaacagtattgtgcttgttatcagagtactcccggaaatttacgacttgaaactgcaccgcatctttttcctgggctttttgaagaattgatgagccgagcacgccttcaaacatttcgggaaacagcgtcaaaaagtcgattttcattcgtctattaacccttccatgagttcaatctcaattttcttttccctgacatcgatatgtttgaccactgattcaatgtaaggaatgagtgcgtctttttttccttttcgtccgatgacccaaacgtcattggctccaggcgtcaaaatttctttgacctttccgatgagttcgccttcttcagtaaatacttcacacccaataatttcgtggaaataaaattcaccctcattcagctctcctaattcttcttcaggaactttaatgattgcgtttttcagctcttctacttcatttaggttttgtctttctttaaactgcaggagatgaaattgcttatgcagtctatgtgtgtttaccgttacctccactggttcgttacggccgtccataaacaaatacagcgtgtttcccggcttgtatcgttcttcggcaaaatctgtttttgaaatcacccgcacttcgcctttgattccgtgggtatttacgattttgcctacgttaaaccatcgctttgtcatatgatcacctctggcgaatttcaattacttttccgtcttttatgacgatggtgttcgctgctgttttctcatgccagtcatccccggcttcaatcgtcagcagcgcatcgacttccttttctttcaactcactgccaagcggcaatgtatgtacttgagcaatttgaaaatcgatgatttttatatcatcttttcgcttttctattgcctttttaaattgttcaatcatatcagggttttgctgttctttctcatgttttctaagctgaaaatagagctggctgcattctcgttcaagcatttgtttcttttcggcaaaagaagctaaaagcttttctttgctgcgctcggttaagacttgcataacggctacacggtgaataatttgcatcgcaccaagctccccgcttttaaaacttttactcgcccaggcttttctattttgcctaagcttctatcagtttaccctttttttgcgtgtaaaaaaaggggaggtgccggccctctcccttttagtcaaatatttcaaattgaactttcttagaagactgtgcgccagctgcaaatacagctgttcgaatcgcttttgcagtccggccttgctttccgataactttaccggtatctgacttatggacagataagcgcagcgcaatcttttgatcggtttcttctcttatgacgcgaatgtcatctggatgatcaacaagcggcgtcacaatgtggacaatcaaatcttccaagtgttgatcagtcattacttgccttgtttagcgttgtggaatttttccatgattccttggctagagaacaagttgcgaactgtatcagatggtttcgctccagtttgaagccatttaagagcaagctcttcgtcaatttttacttccgctggttttgcaaccgggttgtaagttccgactgtttcgatgaaacggccgtcacgtggtgaacgagaatctgctacaacaatacgatagaaaggagatttttttgctcccatacgttttaaacgaatttttactgccattttactagcacctccgaaaatatttcaacaagatagtatattaacaatgataaaagtgtttgtaaagtgttttttcttaacaacggttttatcatgtataaccgattacataaaaggtagcttaaacccttttttcttgccttttgacatgtttgtcatctgcttcatcatttttttcatttcatcaaactgcttaagcagacggttgacttcctgtacggatgtcccgcttccttttgcaatccgtttccgccggctggcattgatgatatccggctgttctttttcaagaacagtcattgatttaatgattgcttccacatgattcagctgtttttcatcaacttggatgtttttcaggcctttcattttacctgcacccggcatcatttgcagaagctcatcaagcggccccatgtttctgacttgcccgagctgctccagaaaatcgtccaatgtgaagctcatcgttctcattttttgttccagctctttggctttgtcttcatcaacgctggcctgtgctttttcaatcaatgtcagcacgtcgcccatgccgagaatccttgatgccatgcgttcaggatggaacggctctaacgcatcaagcttttcgcccaaacctgcgaacttaattggcgtgtttgtaacagcgcgaatagaaagcgcagccccgccgcgtgtgtctccatccagcttagttaacacaacaccggttaaaccgagctgttcattaaagcttttggcaacattcacagcgtcctgaccggtcattgaatcgacaaccaggaaaatttcttccggattcgcgatttctttgacgttggtcagttcatccatcagttcatggtcgatatgcaagcgccctgccgtatccaaaatgacgtagtcataatgttcttccttggctttctcaatagcctgtttagctatttctacaggactgacctgatcgccaagagagaaaacaggcatatcaagctgtttgccgagtgtttccagctgcttaattgcggctgggcggtaaatatcggcagcaaccagcatcggtttgcgattatgctttttgcgcagcagattcgcaagcttaccgcttgttgtcgttttaccggcaccttggagaccgaccatcataataacagtcggcggcctttttgcgacggcgattttgctctcttcgccgcccatcagctcagtcagttcctcttgaacaactttaatgacctgctggccgggcgtcagacttttcatgacgtcttggcctacagcgcgttcacttacttttttgacaaaatctttgactactttaaagttaacgtcagcctcaagcagcgcaaggcgaacctcacgcatcatatcttttacatcttgttcgctgactttcccttttccgcggattttagaaatcgtctgctgcagtcggtcggctaatccttcaaatgccatagtttgccgcctcctaatctaatttctcaagcgcttcaatcagagctgtaatttcttcctcttcttttgaaccggaagcaagctccttcagcttattaaacatctctttacgctcctgaaactttttcaaaaggagcagcttttcttcatattgttcaagcattgcttctgttcgtttgatgttatcataaacagcttgtcttgaaacctcatattcttcggctatttcgcctagggagaaatcgtccaaataataaagcgacatatagctcttctgttttgacgtcaacaacgactgataaaaatcaaacagataattcattctcgttgtcttttcgagtgacatttgagctctcccctttgttaagtcaaatccctttacgataacttagtttacacggttttattgacactgtcaagtttttatcttgtcaaagcggtgattaactttttccaaaatacgctaaatatcatccaatttattccgatattgtatatgaaccctatttaaaggaggatttttatgaaaaaaatcggtttattgtttatgttatgtctggcagccctgtttacaataggttttccggcacagcaagcagacgctgctgaggcaccttataaggcttcgatcacaaatatcagcacagatggaggggtttacggtaaaatcaattacggacaaggtcaatattggcgagtcaagtacaatattacagtaagcggcaaattactcgaccaaaacggacagccagtgccaaacgcgcccgtaagatttgaagcggacacgaaggtcggaaacacaacacaaactgcttcaggaacaactgatgcaaacggaacatttgaggttccaatgtatttggggccagctgctggttactatacgtattacacatctgtttccgttcattactatgacatcatcccattcagagttttttctggtgagtcaagactggtatccactgataacagcctttatcatttcgcctatcaagtaagaagataaaaaagaaaaggccccaagatgttggggccattttcttaatcgtcggctttttccactaaatctgaaaagagtccgtacacataggattctggatcaaattcctgaagatcatcaactttttctcctaaaccgactagtttaaccgggatgtgaagctcgttgcgaatcgcaaggacgataccgccctttgccgtaccgtcaagcttcgttaaagcaatgccggtaacatttgttgctttagagaactcttttgcctgagccattgcattttggccggtcgtggcatcaagggcaagcagcacctcatgcggagcttcaggaacttctctttcgataacacgttttactttttcaagctctttcatgagatttactttgttttggagacgacctgccgtatcacaaattaatacatcggcatttcttgctttcgcagcatgaacagcatcgtagatgacagccgccggatcgcttccagccgtctgcttaatgacaggcactcctgtacgctctccccatacttccagttgttcaatggctcccgctctgaaagtgtctccggcggcaagtacgacagattttccttcttgtttcattttatgggcaagctttccgatcgttgttgttttcccgacgccgtttacacctaccagaaggattacgtttaaacgcccatcctggatgttcagttctgaaatttgctcatctccgctgttataaatctcgaccagtttctcagaaatcactgactggacttcctttggatcttgaatatttctgcgtttgacttcttttttcagttcatctattaattccataacggttgtaaaaccgacatccgcgctgataagaacctcttcaagctcttcgaagaaatcctcatccactttacggtaacgggatacaagatcattcactttgttttgaaaggagtttcttgttttttcaaggccatccttaaacttttcagatacggaatctgtctgttttgtgattttctcttttaattttttaaaaaagctcatcttttaacctctttcctcgttactgaacgaattcttttgtttcttccagcttaacggagattaccttggaaacaccggattcctgcatggttacgccataaagcacatccgcttcctccatcgttccttttctgtgggtaatcacaataaactgggtatcactgctgtatttttttaaatactgcgcaaatcggaacacattcgcttcgtcgagcgcagcctctacttcgtcaaggacgcaaaacggcactggacgaacctttaggattgagaataagagcgctatagcagtaagcgcacgctctccgcctgacaggaggtttaagttttgcagctttttccccggcggctgagcgataatctcgactcctgaatgaagcagatcgttaggatcggtgagcctcagttcagctcgccctcctccgaataaggagcggaaaacttgatcaaagtgtgagcggatttggacgaatgtgtcgttaaagcgcttcgtcatttcttcatccatttcttcaatcacttggaacaaggtatttttcgcttctgttaaatcttctttttgttccgacagaaacttgtaccgttcgttgaccctctcaaactcatctatgcttccgaggttcacggtacccagctcttcaattgcgagtttaatcagcttcacgcgctttctggcttcctctggatcagtttcaagctgatatttctcttttgccccctcaaaggacaagctgtattcctcccgtaagtattggagtaaattatcaagctcgacttccatccgtccgagtttgacttcttcgtcttttaagagcgttgttttttgtttatacagacgtttcatttctttcagctcacgctcatacgtatcaagcccatgctgaagcttgatgcgctgatcgcgccttaatgcaatcagttcgatcgttttcgttttgtcattcaatttatgttttgctgcctcttccagcttttcttcgccgctggtgctagatgacatctctgacgttaagaagcttaagtcttcttttgcttcttttaacgcaagctctgtttcagtgagctctttctttaatctggcaaggttgtcctcttcccccttgcaagcctgctcttttttggccgcagcgatcttcagctcagtcagctcgttggagagagactctttcgttgaggattgcgtttgtttttgttttgtcagtctgtctatgtcctcttcaagctgtttcatcttttcagatacggcagagagctcttcttcaagcttgcgtttgcgcgcttttttctcttcatcgctttcagacagagcagatttttcttggtcatagagctctaaatgggtattgatatttttctcggcaacttgaagttcgtacagctggcctttcacatcctgctgctttaaccttaagccttccccggtttctcttaagtcagccagttttttctccatatcctgaatggattgcttaagggttttgacctcttgttcaagcagtgctgttttctcttccatttcagcgagccgtttcgtcacatcttctagctcccggcttcttccaaggagggagttatttttctttttaaccgcgccgcccgtcattgaaccaccggggttcacaacatctccctcaagggttacgatgcggtaccggtgcccgagaagcttcgcaagctcgtttgcaccctttaagtcctctgtgatcagaacggttccaagaagattctggatgacgcttcgatacgcagaatcaaatgtgacaagttcactggcaaccccgagaaatgatgaatgtcgggcggctgtttccgcgtcacggctttgaagctggcggtctctaataacagaaagaggcagaaacgtcgcccggccgaaggaattctgctttaaatattgaatcgcttttcgggcagattgttcatcgtcggtcacgacatgctgagcagaagcgccgagcgctatttcaatggccgtttcatacttctgttctgtagaaatcagctcaagaaccgctccgcgaattccaccaaggcgctctttcgcttttagcacttctttaacaccttgataaaagccagaaaaatctccctgcatcgtctcaagcatgtccttttttgatctcgcttgctgaacgtattggtatgcctgatacagagcggattcatttttttcgtattgacgctttttctgctcatattttgtctgcatatcacgatatgcaccgacttgactgtgaatctcctgctcaattcgggcaaattccgtttcacatgcggctttacgcgcagaaatatcacgccgttcctgcaggtgcttttcattgttgtccgcgagtctctgcaatgtgacagcggattgggacatctggtcatcaagaagctggagttcgttgcgtatcgaagcctggctgtttaacagctcaaaataatcacttttcagctgctcgattttctcttcgacattttcattgtgaagactgagagcctgctgtttttcttttacttgcgcccttaactgcttcacctcagcctgaagcgtttcgaagacagcttcctgcttcgaaagctcttctttcagaaccgtttctttttgctgaaactgaacgatggcttcttcaagctgttcttggttttgcacagcgtttttctttcgttctttcaggacttctttacggccttcaagcttttccagctcctcactagttaccagtaaaacttgctggagctcatctactgactcatcaagcgcttgtattttgtcccttgtatcctcaatctttgcttctttcgcagaaatagcagacgattcagcaagctcttcttcttttgccatctgcactttctctttaagagtcgaccatttaccatgcagctcttcgatatcataggcagtcagcgcaatttcaacatgctccagctctttctttttctcaaggtagtctttcgctattgaagcttgaatttttagaggttcaacctgtccttcaagctcatgtaatatatcttctacccgatttagattgtcctgtgtctcaaacagtttattttctgcttttttctttctcgttttatatttaagcaccccggccgcttcttcaaagatactgcggcgatcctccgctttgctgctcaggatctcttccactttcccttggctgataatagaaaatgcttctttaccaaggccagaatccataaataaatcaataatatccttcaagcggcacggctgattgttaatcagaaactcactctcacctgatctgtacacacgtcttgtgacactcacctcgtggaagtcaattggcaagaaatgatcatcattatcaagagtaagcgtaacttcagctagatttaatcgctttcttgaatcactcccggcaaaaataatgtcctccatttttccgccgcgaagagagcgtgccgattgttcgccgagaacccagcgaatggcatccgtgatgttgctttttccgcttccgttcggcccgacaaccgctgtcacgcctttaacgaagtctacggaaatccgttctgcaaatgatttaaatcctataacgtctaaacgtttgaggaacatagcgatcctccttatgtaataagtatttcaattctatcataaacattggtgaaataagacggcatacatactgaaatccccctgagtcataagggggattttattgtttcgtatggtgtttttgcaatttagctaaagcttcctgagcagcgtgctgttcggcttctttctttgaacggccgtttccgactccgagtggttcaccttttagagatacgatggcttcaaattcacggttgtgcgcaggtcctttttcgttggagattttatactccagagagcctttgccgtcccgctgcacgtattcctgcagctggcttttgaaatccatcacatgagaaaaagcaccatcgttaattttagggaacacataaacttttaagaaactttcgaccggctctaatccttggtcaagatacaaggctccgataaatgcctcaaaaacatccgccaatagagcaggacgctttcttccgcctgtcatttcctcgcctttacccaacaggacaagatcgccgaatgacagctcgtgagccaatgaaacgagagacggttcgcaaacaattgcggctctcaatttcgtcaaatctccttcactcatagccgggtatttggcaaataagaatctggagatcgtcagttccaaaacagcgtcacctaaaaattcaagcctttcattatcttcatacggctttttccgatgctcattcacataagatgaatgtgtaaatgcttgatacaaaagcttttcattttgaaagtgaaccgaaatccgttcttgaaactctttaaattgttctacttttttatagaacttttttttatctttataatgtgagtgttttgacatagtaacctccataggcacatcaggttcaccgcgcttctctgactaaaccggatacagcgcgcgtaaaagcggcatgctgtaataactgcacgaataaagggctaaagccccgcgtttcggcgggacttttagcatcagcttattgctggttttgtatgtagttcacagcgtcgccgactgttgcaatcttttcagcatcttcgtcagaaatctccatatcaaactcgtcttcaagttccataacaagctcaactacatctagggaatcagcacctaagtcttccttgaaagaagcttcaagtttgacgtctgcttcatcaacgccaaggcgatctacgatgattttcgttacacgctctaatgtgtctgccatagcaattcacctcccctcaagtattatagtggattcgtttttaaaaaactagagaaactatgatgaaattttcgagaaaaaacttacatcaccattccgccgtcaatatgaagcgtttggcctgtcatataacgggctccctctgaagctaggaacgtgacaacactgctgacatcgctaggttcaccaaagcgcgcgagcggaatttgtttcagcatttcgtcttgaacgtcttttgcaagtttatctgtcatatcagttgagataaatcctggcgctattgcgtttaccgtaatatttcggctggcgagctctttagcagaagacttggttaaaccgatgacgccggcttttgcagccacatagttggcttgtccagggtttccgctgacgccgacgatagacgatacgttaataatgcggcctgaacgctgtttcatcatttgtcttgtaacagctttcgtgcagttgaaaacacccttcaggttaatgttaataacgtcatcccattcgtcttctttcattctcatgatgagattgtctcttgtaatcccggcattattaaccagaatgtcaatcgtagaaaaaactgatagcgtttcttttatcatgttttgtacatcttcgggatttgatacatccgctttgacagcaattgcgtttctgcccatagatttgatttcatcaaccacttcatttgctttcgcttcattgccggagtagttcacgacaacattgacgccgctttttgccagatcaagggcgattgagcggccgattccgcgggatgcgccagtgacaatagccgttttatcattaagcattatcattctcctccttaagcgtttgaattgccagctcgatcgtttccggatctgatacagcaattgtttttaaccgtctatttacttttttcacaaggcctgaaagcacttttccgggaccgatttcaataaaagtcgtaacaccctctgcgatcagcttgttaatgctttcctcaaaacgaaccggagagtaaagctgctcaataagtttttctttgacatctgctttttcagtcatcacgtcagcagaaacatttgagatgaccggaacgtcagcgtcttttatgtcacaggcgtccaatacctctttcagcttttcagcagccggtttcatcagttcagaatggaacggaccgcttacttcaagcggaattgcgcgttttgcgccgttctcttttgccagttcagatgcaagctcaacccctttagctgttccggaaatgacgatttggccaggacagttgagattcgcaagctgtacaaggttgccttcctctgtgactttatcggttactcgctttaatgcttcagcatccatgccgagaatcgcagccattgctccttcgccagccggcaccgcttcattcataaactctccgcgctttctgacggtataaacagcatctttgaaagacagagcgccagccgcaaccagtgcagaatattcaccaaggctgtgtcctgctgtgaaatcaggtgtaatgccagattctttaaatttctcaagaacagcgatgcttgtcgtaagcaaagcaggctgcgcattgtatgtaagtgttaattcttcagcatccccctcaaaaataagcgagctgagttttgtttccaacgtttcatcggcttcatcaaacagacgctttgcagcaggcacctgttcataaagctcttttcccatgccgataaattgtgatccctgacccgggaataaaaatgcaatcttactcatgatgtaaaaacctccagactactcatctgttttttcttctttcacttcttcctgaatgagcgcagccacattttggctgaccatctctcttgcttgccgaatcgcatggaatacagcatttgaatctgaagagccgtgcgccttgatcacaggcgcttttaagccaaaaagacttgctccgccataattcgaatactccattttcattttcatttctttcaattttggcttcagcacagctgctgcaagcttggatgtcaaagtagacgtcattacgtctctcatcattttaaaaatagacaacgcagagccttccagcgttttgagtgtaacattcccggtaaagccgtctgttactacaacgtccgccacatcatctaaaaggtctcgcgcttccacgtttccgataaaattgatgtttgctgtttcttttaaaatttgaaacgtctgcttcgtcagttcgtttccttttttatcttctgttccgacatttaaaagtccgactctcggtgaagtgacaccgcgcacttgctgagaataaacagaacccatgatggcatattgaacgaggtgctccggtttggcatcgacattggcgccgacatcaaggagaagaaatccgtctcccgaaacagtcggaagtgtcggggcaagcgccggacggtcaattcctttaattcttccgacaataaagagaccggctgtcattaatgcaccggtatttcctgctgaaatgcaggcgtcagctctgttttccgcaacctcctgcgccataagaaccatagatgagttcttttttcttcgcacggcacggacaggttcatccgtaggctcaatcacttcatctgcgtgcagcaccgtgatgcgatctgatgtagttgttaaatgtgattctatcgttgttttgtcaccgacaagtgtgatatggagatcatcaaatgcctctataccttttataactccgtcaataacagctttgggagcgtggtctcctcccattgcatctacagctattctcatgcatgctccacctttatgaatgttttgaacgatacatgtcaaagcgtccagaaaaaacaatttcttcgccaacgtagctgttcacttcgacaaccgttcttcctttttctttttcgacagccgtcactttcgcttttgctacgacacgttcaccctgctttacctgtcttgtaaagcggatgtctgcacttgcagtcagcgccagctcgtcatcaatgactgcaacggccaaagaattcgcctgtgcaaataaatggtgtcctctcgcaatctgattccggctgaacacgtgctcctgttttatttctaaaatggatatcgcctgatcatccagctcaaggtcaataatttctccgataacttcatcaagtgacagggacttcacttcgtcctcaagtgttttctctgccacgttcttaattctttctctcagttcaggtatggaaagctctaagcggtccaaacgtatcgtctggatgctcaccccgaatttacccgctagttcttcatctgtaataaagggggttgcttgaatcgtctgctgaagtaattcctggcgttctctcttatttcttctcatatctaaacaccatccggacaattaagactaggtactaatagtagtatataatttcatagattggaatgcaacgattgtttctggctgaacaccaaaaacttctgatactcagcttaatttttccccgtccattactccgctcttcagcaattcatctcttaacacagcgtattccggctccttccagaacgcgtcagaagccacaagattcgcagcatcctgccttgccgtttcaagcgctctgtaatcatgaaccatgtccgccactttaaattccggcattccgctttgttttttcccgaagaaatcaccgggacctctcagttccagatccttttcagacagctcgaaaccgtcattggtttccgacatgatcctcatccgttctttccctgtttctgattttggatcagccatcagaatacagaaagattgatgctcaccccgtccaacacggccgcgcagctggtgaagctgtgatagcccgaaacggtcggcgtcataaatcaccataatcgttgcattcggaacattcacgccaacctccacaacagtggttgatacgagaatttgacagtgatttgcgctgaattctctcatgacctggtctttttcatcggaatgcagctttccatgcataaggccgacattccattttccccgaaaaatatcagaaagcatattgtacacgtcaatggcgttttgcacatcaagcttgtctgattcttcaatcagcggacagatgatataagcctgcctgccttgctttaattctttttcgacaaatgccaatatacgatccagcatgtcatgttttacccaataggtttcgattctctttcgtccagccggcatctcatcgatgacagatacatccatttcaccgaacactgtgatcgctaacgttcttgggattggagtggctgtcataaagagaacatcgggatcctgccctttgttccgaagctttttgcgctgctcaactccaaatctgtgctgttcatcagtaataacgagactcagcgccttaaactccacctcgtcttggattaaagcgtgggttcctacaagaatatcaatctcacccgccgcaagacgctcaagcagttcttttcgccgcttccctttaacagagcttgtcaaaagagcaacgctgacgtcccatttttcaaatagcgaaacgagcgaatcagcatgctgctcggccagaatttctgtcggcaccatgagcgctccttggtatccggataggatcgcggcatacagtgcaatggcggcgactgccgtttttcctgatccaacgtccccttgaagaagacggttcattctgtatggagaagacatgtctgctgttatttcgcgaagaacgcgtgactgggcgtttgtgaggggaaacgggaggcttttgataaatctcatgagttcttcgtttgaaaaacgctgccgtatcccttgtgtctgctctctttccgcctttcggaacgcctgcattttcaactgaaacaacaaaaattcttcataaacaaaccgccgtctggcaagctttaatgcttcccttgtttcaggctggtgcattgcttttaacgcttgataatagtcaggcagtttatagctttttcttagcttttccggaagaggatcaggaagtgagtctgcatattgggtcagcgcctgctgaataaaccgcctcatcattttgacggtaacattttctttcacagaatacactggttcaatgcttttgtcttcttgatgcggcccgtttttcaactcctgaacagagatggtttggcggtgcttgtcccatttacctgaaaccgtcaccacagagccgagcgaaagctgcttcttcaaataaggccggttaaaacatacggctgtaattaaatagtggccgaccagaagcctgaatgtcagcctgtttcgtttttttccgtaataggtaagagaaggctctgaatgaaccttcccttcaactgtgactctttcatcatgctttacttcttctaaatccctcagctcgtagtcatcatagcgataagggaaataattcagaagatcagaaatgtcataaataccgagttcattcaatgttttttctgtttccggcccaatacccttaatgttagctatactagtttgctgatgttgtttcacgtgaacctagcgctcctccgaaaatttttttctctaattctcttcctgtcggtgttgccgctaaaccgccctggcctgtttctctaagtgcagttggcatcgtttggcctattttatacatggcatcgataacctcatcacatggaatacggcttgtaatgcccgccaatgccatatcagcggcaatcatcgcatttgacgcgcccatcgcattccgtttcacgcaaggcacctcaacaagccctgcaacagggtcgcacacgaggcctagcatattttttaatgtaatggccatggcttccgcgctttgttcgggtgttcctcctgccatttcaacaatggccgcagccgccatacctgaagctgatccaacctctgcctgacatcctccggcggcgccggaaatgcttgcgttattggccacgacaaatccgaaagccccggctgtaaacaaaaagcggatcatttgttctcttgttggattcagcttttcttttacagcaaataacgtaccgggcaccacaccggcagaacctgcagtcggtgtcgcacagatggttcccatggctgcatttacttcatttgttgcaacggctttcgatacagcatctaaaatcagcgggccagacaggctttttcctgatcgaatataggcctgcaatttaacggcatctccgcctgttaagcccgtttggctcgtaactccctcgagtcctttctgaaccgccgcttccataacagacaggttatgatccatctgctgaaaaatgtcctcttttgttttttctgttacttccatctcttgagctatcatcacatcagagatcaatatttgtttttctttagtaatctcaattaattcttttacattacgaaacataactggctcctcctgacccttttcgctagtcagcaatctttgtcacttgaataatattcggcagtttcgacagctcgtcgagaatgtggtcgtcaatattttggtcgacctctattgtcatcagcgcaagctggccgatatctttccgggctacttccatatgtcctacgttgattgaaaatttcgccagaacattggcaacaccggcaattgtgccaaacttgtcattatgaacaactaatatggccggatgatttcctgacagccggagctcaaaaccattcaattctgtgatttcaatctttcctccgccaatcgaaatacccgtcagttccagctcacccttttcatcagaaatggtgatttttgctgtgttcggatggaccgggactgcgtcttctacccgaaactctatatcaattcctttagcttctgcaatttgtatagcggttttaatccgttcatcgaatgtatcaaaatcaagcaatccgccgataatcgcgacatctgtgccgtggcccttatacgtttccgcaaacgagccgtaaaaagatacaatgatgcgctcaggctctctgccaaataaacttctggccactctcccgattctagcagctcccgctgtatgagagctggacggaccgatcataaccgggccgataatatcaaaaacgcttctgtatttcatgctattcctccttatgaaccagagcttattagcgctttgcttctagactaattgatcagatataaaatggcaagcgggcgcgttacagcgctgccgcacttaaaagcagacataagaatagaagggcaaattgcccttctattctgctgaaactatatacgaatacagaggctgtttcccattgtggatctcaacctcaatctcctcgtacttttcactgagaaacgcttcaagctgctcagcttcttcctgagacgcatcctcaccatatagaatggtcacgatttcatcatcttctccgatcatttctgacagcagcaatttcgcggctgacagctgattttcagaagtgccgataatcgttccattcagaatgcccataaagtcgccttttttaatgtctttaccgtcaatatgagtatctctgactgagaacgtcacctgtccgctttttacttgctgaatggcgcttagcatattggcctcgttcgcttcagcttcttgatccgggttaaaagccagcagagctgacatcccttgcggaaccgttttagcaggaatgacaaaaacctgttcatccactacgctggccgcttggttagcagccatgataatgttggagttgttaggcaggataaataccgtatctgcatttacagacttcacggcatcaacaatatcctcagtgcttgggttcatggtctggccgccttcaatcacaacagaagcgccaatgcttttgaataggtctgaaattccttctcccatcgctacagtcacaatgccatacggctgttttgccggcggtgtttcgttgtctgcaggtttgctttcttgactgatgatagaggtatgctgttctctcatattttctatttttattttgatcaattcaccgtaatgctgggcgtagtttaacacgtttcccggctcttcagcatgaatatgaaccttcgccagcgattcatccgcaatcacaagcagagaatctccgaactggctgaggtcttgcctgaacgtgccttcgtcgaactctctttttgtctgatcaagcctaaccatcacttcggtacagaatccaaattcaatatcttcggtattcatcatgctttgcgcgctcttgtgatgctctgcgctgaccatgtcgtcaagtgacggaagaactgctttctgaggtacagtttcaccttttaatgaagcaaggaaaccttcatacacacagagcaggcctttgcccccgctatcgacaactcctacttcctttaggacaggtagcaattcaggggtgcggtttaaagacgcctctgcttcttctgtcactgcaatcatcagcgcagtgatatcggtttctttttctgctaagatcatcgctttttttgcagcgtcttttgcaactgttaaaatggtgccctctacaggtttcatgacagctttatacgccatgtctacacctgcttgcagcgcagcggcaaactcaagtgcattaatttcttttttcgtttcaatgcttttgctaaatccgcggaacaattgggataggatcactcctgaatttccgcgtgctcccatgagcagccctttagataacgcggaacccaccttcccgatatcatccgtatccatttgttcaacttctcttgctccggaagtcatcgacaggttcatatttgttcccgtatcaccgtccggcaccggaaacacgttcagtgcatcaactgcactggcattttgagacagattctgcgctcccgcaagaatcatctcggcaaaggttctgccgtttaatgttctgatagacaatcctactcctcctaactacgggttcgtcactcgtacgccttggacataaatattgacagagtccactgccagtccgatggtttgatttactgtgtactttacttttgtttggacattatgtgccacttcagaaattttcgtgccgtagctgacaatgatatacatgtcgatatgtatctgttctccttcttggcgaacttggacacccctgctgaaattctctttccgaaggatttcagtcagtccgtctttaatctggtttttagaggccatgccgacaatgccgtaacagtcaaccgccgcgcctcctgcaaccatcgcgatgacttcattagatatatcaatctgtccgtacttcgttcttaattcaatggacacactagttcctccttcgaatgcatagagttacagctattctactatatggtttccattatgaaaagaccaggcaataatcgctggccgtacctctacatatactatagcgctgctgtttccgcaagatgtcaagtgaattttcttgaaagatgatgaaacaatagttgcaaacgttttttagctgtggtaaattatttaaagtatccatatcgaaagcatctaagattatatgaatgttaaaaagtagatgttttgtgcaagtgaggagggaaacaaatggcacgtaaatgcgttatcacaggtaaaaaaacaacagctgggaataaccgttctcacgcaatgaacgcttctaagcgcacttggggcgcgaatcttcaaaaggttcgtatccttgtgaacggaaaacctaaaaaagtatatgtatctgctcgagctttgaaatccggtaaagttgagcgtgtataacaaaatgaacgcctgccccgatatgtggcaggcgtttttatgtggtgaaagagggctttgaacccctgggcattaatcttttctaaatgagcccagcatcgcccggacaattcctcctaaaaacttcggcaatttaatggtgtaaaatttcatttttgtcccctcctataacgtcccgtaaccgccttgttcattgttttcagcaattgaatgaaagcacatgcttaatccgtgcttcttatcattattaatatgccttttgcaaacgaaaaagtacctcgtgaatgaatgagttcgttactaatacatagtgttgaaccgagcgtaatatgacaattatttagaggatatttaaaaccggtcagggtcagctcatgtatgtcttcggaaaacggtatgaaggagatatatcgcttattttcatccttctcaatatcatattcaccaggaggaaacatttgaatatgattttgtttgtctatcagcctaatttttatgttcgtttttacacctctatacagtagctgaatgtttcctaaaaaatgatcagctctgccgcctgtaatgccgaaaatctgaataatatccggctgcttttccagcgcccaatcaagggcgaggtctaaatctgtttgatctttttctgcttgatacacatgaagggcgggagcggctttttctattcgccggcgttcttgctccgttatgctgtcaaaatctccgaaggcttcaacaggaatgatcccggcatctaagagagtgacggtgcctttgtcaacaccgatccaaagcgtgtgttcgtccgtatagccggttagatcgggaatgagatttttcgggcctcccgcaacgatattaattgttttcatctctgattcctttctctgcatacaggaaaaagagcttaggctattgtatgcccagctcttttctaaagctgcttatttacttcctctgatttcagaaattgcttttttgcggtcagactggccataaacagctgaaccggcaacgagtaaatttgcgcccgcttcaatgacgagcggagcggtttctttgttgacgccgccgtctacttcaattaacagatctttttttcctttttcatccgccattcgcttaacctcttttattttaggaaggactgaatgaataaatttctgcccgccgaagcccgggttcaccgtcattaaaagaacaagatcgagatcgtcgaaaacatgctcgatgacttgtacaggggtatgcgggtttagaaccactccggccttcactccttgctctttaatgagctggatggtacggtgcaggtgcggacatgcctcagcatgcacagacaggatatctgcgcctgctttcgcaaaagccgggatataacgatccggctcttctatcattaaatggacatcaagcggcagatccgttaccggccggacggcttctacaatcagcggaccgattgtgatattcgggacaaaatggccgtccataacatcaatatgaatacaatcggctccgcctttttctacatctttaatctcattgcctaaagcggcaaaatcagcggaaagaatagatggtgcaacctttatcattatgctaatacctcggctttctgtctttaatctccgtcataaattcaacataatggtcatagcgatactgctttaattccccgtctccaacagcttgtttcaccgcgcatttcggctctttcagatgtaaacagcctctaaatttgcatgaagcgcttttttctctgatatctgggaaggtatagcccagctcttcttcctcaatgtctgtaaattcaagcgagctgaatcccggcgtatctgcaaccaaacctccggacgtgtgaatcagctccacgtggcgggttgtgtgtttcccgcggcccaaatgctcggaaatctcgtttgttctcaatccgagctccggactgatcgcgttgagaagcgaggattttccaacaccggactgaccggcaaataccgttgttttatcctgaaaatgcgggatgatgtccgttaaactgtcttggtccttagaggaggtaaggtatacgtcataaccaatattccgatagtcttctgcataggcttgtatcgtatcttctgtatcttgatcttcaatcagatccattttagtaatgcatataatcggctgaatatcattggcctcaacgagaaccaggaagcggtcgagcaatgccgtgctgaaagaaggctgaaccgctgagaaaacaaggaccgcttgatcaacgttgcaaattggcggcctgataagctcgttggttctttctttaatttccattaaatatccttctttgtcattttcagcttgatacacaacataatcaccgacaagaggggtaattttgttttttctgaaaatgcctcttcctctgcattgtattactttatctgaatcctctgattcatccagtacatagtaaaagccgcttagcgccttaataattttgccctcaggcatattttccctccttgttattcatctttcggatactcaatggttttgtagctgacaactttattgtttaccattacttgatagtaccctttttggccgggttcaatctttagttcgatcgttcgttcagtcggctcttttatcttaaattcttcgtaagtgtcagagatgctgtgatccgcatcgtcaaccgcgatttgcacttgaagctcgtccccttcattttctggttcgtaggggatcttgaccttttctttcactgttttcgcaggttttttctctggtccgagagagaatgtcacttcaacttcgtttcccggctttactgccgtacctgctgctggtttttgtttgacaacctgtccttctggaacatcatctgagtatgcttctttttctacaagcttcaatccgttgtcttccagatatccagacgctgcttctttactataggttttcaagtctctaagcgtaatgtcttcgggtccgatactgactgtaagtttgacttgatcttcactcgggacaagctcagtccctgctgaaggattttggtcaatgacagtgcccgcatttttctcgtcattcacttcatttactgttacatgtttaaacccttggtccttcaacgctttttttgcctggtcgaccgtttggcctgtcacatcaccgatctccgtttttgcttttccggtgctcttataaagggtgaccgtggcgccttctttgactgtggtatccgctttaggatccgtttttaccatcaggccctcttcaattttttcatctgagatttccaacaactcggaatcaacctgtaaaccttctttttccaagagccctgcggctttttcgtattccattccggagacatcaggtattttgacatccttaggcatgaaaagcgacggaaaaacagtgacagcaagaattccagctgtgataaaaacgaggcatatcgtgagcaaaacccacggccacttttttcttttaccgttcttctttgttttgttttcttgtgcggttgtcacttcagcttctttttcgccagcagctttagcgagttcttcatctttaatgataggtatcgcttttgtcatttcttcatcttcttgaatcgtaaatctcttttcattgagtctgtcggcatcaaaagctgtttttatgtctgcttccatgtcttcagccgtttcgtagcgatgaaaaggatctttggcagttgccttgagtatgatgttttcaacgctttgggggaccgatggattccacctttttgccgaaggagtttccgcttgaagatgcttcaaggcgatgctgactgctgactctccatcaaacggaatacggccggttaaaagctcaaatagaacgattccaagcgcataaatatccgatttctttgtggctaagccgccccgggcctgttcaggtgataagtaatggaccgagcccagaactgaattggtatgggtgattgtggtcgaacttagtgccgtcgcaattccaaaatccgttactttgatatttcccatatgatcaatcaaaatgttatgcggcttgatgtctctgtgaacaatctggttttgatgggcatgagcgatggctgagactatttgctccatgatgttcagcgcttctttagggtgaagtggcccatttgctgttatgtattctttaagcgtcatgccttcaacgtattccatgacaatataataaatatcatcttcctcgcccaaatcgtaaatgctgacaatattcgggtgatcgaggcttgatgcggattgggcttctctgcggaaacgtctgataaattcattgtcatttgcatagtcaaaccgcaggattttaattgcgacttcacggtctagaatgatatcctcagctaaatacacgttggccattcccccgccgcctataacgcggagaatttggtaacgcccgctgatccgcttgccgattagcactgatcttcaccctcttcaacttgtaaagcaagctcaagcaaaactgctgtgatgttgtcttctccgccgttctgattggctttgtccacaagcaggtttactttttcctgaggagctgaatcgctttgcaggatgtcttttaactcagtgccttccactttattcgtcagtccgtcagaacatagaagcagtttgtctccgggttctatatcaaaggaacgggtgtcaatactgactgactggtctgttccaagcgccttcgtcaacacattttttcgcggatgatgttcagcgtcttctctggagatctctccagtgcgaaccagttcatttacaagcgaatggtcttctgtcacttgaacgaaatcatcgtcctgaagcaaatagcatctgctgtctccgatatgggcaacagaaaccgttttccccgtaaaaagtgcacatacaatcgtcgtccccatgccttggcattcttcgtgggcttgagcatgatcgtatattttgctgtttaccgaaagaatctgttcaatgagccatttttcacattccgagggcgcagttggaatcgtctctgcttcattccatttctcccccatggctttcacagccatcttgctcgcaacatctccagcaagatggccgcccatgccatcagcgacaaccgctaatataaattcatctttccccttgaatatccccgcatcatcttcattatgctggcggatttttcctgtatctgtttttaaggctgttaacaaccctcatcacctcgtctcgtcttgacgctccttcgcgcgaagctgaccgcaggctgcgtcaatgtcatgtccttgctctcttcggattgtgacatttactccgcgggatttcagcgttttttcaaaagcaaaaatctgatcacgcggtgtgcgcacatagtcccgttcaggcacgtagtttaccggaatcaagttcacgtggcatttgactccttccagcaagtcggcaagctcttcggcgtgttccacctggtcgtttacgcctccgaacagcccgtattcaaagctgatgcggcgtcccgttttattaatataatatttaacggcttccattagatcaggcagtttatatgctctgttaatcggcatcaaacggcttctgatttctgtgttcggcgcgtgcagagaaattgcaaagttaatctgcatttgctgatcagcaaattcgtaaattttcgggatgatcccactcgtagagaccgtaatatggcgagcaccgatattcaggcccttgtcatggttaatgattttcaagaaagcgagcatttcgttaaagttatcaaaaggttcgccgattcccatgatcacgacagagctgacgcgttcatccgtttcatcaagagctttttgcactttgactacttgagcgacaatttcccctgcttcaaggtttcgttttaagcctccaagcgttgacgcgcagaatgtgcagccaatacggcagccgacttgtgtcgttacacatacagaattgccatactcgtgtctcattaaaacggtttcgatggtataaccgtcatgaagctcaaacaaaaacttcatcgtaccgtcttgagaggtttgtttaacagccgttttcagcgttgttaacacaaagtgagtgtttaatttctcacgcagatcctttgagaggtttgtcatatcttcaaaagaagatacgcgtttttcatatagccattcaaagatctgggctgcacggaacggtttctctccattgtctgtcagccattgtttgatttcatctaattcaaaagaataaatagacggacgctctgtccgcaattcttttcttacttttgttttattaagttctgccattgcttatcccttctttctcatgctgcaaataaagaaaccatctgttccgaaataatgaggaaggatttgaagccttccatcccgaacaaagggtctcaccttttcaggcagccgcttttcaagagacaaatcgggttcaaaatcaggatgttcttgtataaacgcatgtattacttcatcattttctgtccggtccattgtacacgtactgtagacaagagtgccacctttttttactaatggtgcgatttccctcaagatcgacagctggatttcagctagacgggcgctgtcgtcaggctttttcgtgtatttcatgtccggctttcttctgataacaccgaaacctgagcacggggcatcgaccaatattcggtcaaactgttcgttttcaaacgtttcccccgcttttctagcatccattgtttccgcatgaatgattgtcaggccaagccggtctgccgcttctttgatcagcttcactttatgtttgtgaagatcaagcgacgtaacgctccccttgttcttcattaattctgcgatatgagccgactttccgccaggcgccgcacacgcgtcaagcactgtttcatctgacttaggatcaagggcgcgggcgacgagcatggagctctcatcctggatggaaacttcaccgttttggaagaaatgagttccggcaattgttccctttaagagcttcacagcatcttcagcgaggtcgcctttttcaacttcgattccctcagcagccatttggtcaagcagctcagctctgtctgctttcatttgattgacacgcagcgtctgtttcggcggaatgagatggatgcagcaaatcttttccgcagcttcaaatccatacgcatccgcccactctttcacaagccactccggatggcttgtttctgtcgccagccggcgtacaggatcttcgatcgcgtcaaaggatggaacaccttcgcgctgaatagaacggagcacgccattgacaaaagaagcaatgcctttgtgtccgcggattttagcaatctcaaccgcttcatggatggctgccctgtctggaatcttctctaaatactccatttgatataaggataggcgaagaagctgaatcacccacggctttaccttttgaggcttattgataaacggtttaagcatataatcaagcgcgatcttattttgtaatgtaccatagacaagttcagtcaaaagccctctgtcctgatcactcagttcatttgatttaatgaccgatttcagcagcaggttgctgtatgcctggttttgttctaatttgatcagcgcctcaagggcgatgtcacgaacactagtttttttcattgtttactcctaacacatcaccgacttcaacatgagcgcctcgcacaaagtcttcgcctttcattcgttttttgccggccggctggagttcggttaataacagagccgtctcgttacctgtggcaacgataatcccttccttttcaaccgcaacgactgtgcctggctcagctttggttggtgcgggtgtttttttggattcccacactttcaagttttgtccattaagcgtcgtataggcaacaggccatggatttaagccgcggatctggttgtaaagctcttcgcccgttctggaccagtcgagcagctcttgctctcttttaatgttaggcgcgtatgtcgctttctcttcatcctgcttttcaggtgaaatgctgccggcaataacgtttggaaccgtttctgacaatagcttcgcgccagcaacgcttaatttatcgtgcagtgttccgacattgtcggtttcttcaatgtccacttccacttttgagatcatgtccccggcatccaatttttctaccatatacataatggtaaccccggtttttttctttccctgcagaatggaataatggatcggagcaccgccgcgcagttccggcaaaagggatgcgtgaacgttaatgcagccgtattttggactgtcgagaagctctttaggcaaaatttgtccgaatgccgccgttacaatcaggtcaggctttaatgccagcactttttcaatttcttctgtcaatctgactttttccggctgaagaaccgggatgccgtggcgcaatgcctcttccttgaccggaggaggtgtcagtactttttttctgcccttcggacggtccggctgtgtgacgacccccactacttcatatccgtcctctatcagggttcttaaaacaggaactgaaaaatccggcgttcccataaatacgattctcgtcatcaaatcatccttccatatccgctagttcatcttctgtatagtatttacttattttagatgtaaacagcacaccgtctaagtggtccatttcatgctgcacggctcttgctaaaaagcctcgcgcttccagaatgaacggttttccctgacggttaaacgcacgcactttgacataatcggcacgtgtgacatcaccatagacgccaggaaagctcaagcatccttcaattccggtttgctcgccgcttttttctaaaatttcaggattaacgagatcaattctccctctgtcatccccgatgtctacaactgccgctctttttaaaatgccaatttgcggcgctgccagtccgacaccatccatttcaagcatggtgtcgtacatatcatcaagcagtttttttagctttttatcaaaaacagtcacggtttccgcaggtgtttccaaaacctccgcaggatgtgtgacgaccttttttactgccaatttgttaccctccaagacgtgagatcttacatcatcatataaggattcatatcaattgaaatcattacatgtttttgttcaatttcgcgtttataatgttccagtatcttcttcaataaagcggataactgggtttcctgtttgtattttatcacgcattgatagcgatatctatctttgatcctggctatcggcgacgcgcttggtccgagaattttcgtgtcagctccgcagtttgctttcaaaaaatgagcgatcttttcagctgtaaccgctgctttcgccacttcctcatgagaaacagtcacaagagccaaatagtagtatggcggataggattgctctctcctgtgcgccatttcatgctgatagaacgtttcataatcgtgtgttttcgtcagctggatactgtaatgagacggtgtatacgtttgaatgatgacatggccgggcttttcatgcctgcctgcccggccgctgacttgcgttaacagctgaaatgttttttcagccgatctgaaatcaggaatatgaagtgttgtatcagcacttaacactccgacaagcgtgacattcggaaaatcaagtcctttcgcgatcatttgcgttccgagaagaatatccgcttttccttctccgaaagctgacagtaatttttcatgggcgcctttccgtgatgtcgtgtcaacatccatccgaatcactctcgcacttggcagcacttttgtcagctcttcctccactcgctgtgttcccgttccgaaaaagcggatatgctcgcttgcgcattcaggacaagtgtgcggaacaggctcttcatgtccgcaataatggcatttcagcctttggccataacgatgatacgtcatggaaatgtcgcagtgcgggcattgcgggacatagccgcaatccctgcacatcacaaaggaagaatagcccctcttatttaaaaacagcaccgcctgctcacccttggcaatcgtttcttcaagcttttccatcaattcaactgaaaacattgaacgattgccgtttctaagctcctctctcatatcgacaagcgaaacctcaggcatcacccggtggttaacacggtgcttcagtgaaagaagctcgtatacgcccttttgcgctcttgcatatgactctaatgtcggcgtagcactccctaatacaaccgggcagctgtgatgctcagcccgcttgattgccacctctttcgcatgatagcgcggcatttcttcctgtttataggaagactcgtgctcttcatcgatgattatcattccgagattttcaaacggagcaaaaatcgcggatctggcaccgacgacaagccgtacttccttccggtggattttacgccactcgtcatatttttctcctgtggataaaccgctgtgcatgactgccacctgggagccgaagcggcccttgaagcggttgaccatttgcggcgtcagcgatatttccggtacgaggacgatggcttcttttcctttcgccagtactttttcaattgattgcagataaatttccgtttttccgcttcctgtcacgccgtgaaggaggaacactttatgctcatcgctgtccaatgtctcgcgtatgggctcgaaggcagccctctgttcgtctgtcagcggcaggggctctgtttttttgaacattttgtcctgatagggatctctgtaaacctcttcatagctttccttcaaaagccctttttggataagggttttgatggttgcagagctcgtgtccgtttttttgcacaattccgccgcaggaattttcacaccttccggctcagagatgagaaagtgaagaatcgcctgctgttttgctgcttggcgggacaatccctcagcctgcttagcaagctcttctttactcgcatttgcctgaatatgcctgaccatttttttattggttttttgcgcgactttatacgtcacgtcaatgtcccctttttgaacatgcctttgaatcagtttcagcgtctcatgatcgggtatatctgaatacagcagcgtctttgtttcagaaaacagccgttccacttgcggcggaagatcggcttcgtgtgcaatttttaattctttttcatatttcgcctttaaggcggcaggcagcattgcttgaagcgccgttattttaaaagacagcgttttgtctgacagccatgatgacagaatcataagctcctctgtcagaacaggtgtaagatctaataaatcctctacttccttgacagattttcccgataggtcagatgcttctttgactgctgtcacaaacccttgaatcttacgggggccaaacggaacaatgacccgcatccccgttttgatcatgcccttcagatggtctgggattttataatcaaaaggcctgtctatatttttggtgctgacatcaacgatgacttctgcaaaattcatgagcgctctccggtttgttttgagagggctgcgatctcctgaaggatttcaaaagaaacatcgagcttagacataatcgggagttcgcgtttatgcccgtctttgaaaaagattgtcacgatattcgtatcagcaccaaaaccggccccatttgctttcacatcatttgccacaatcaaatcaaggtttttagcggcgagctttttacgtgcatagtgttcaatgtcttgtgtttcggcggcaaatccgaccaaaatctgctctttctttttctcgcccaattctttcaaaatatcgactgttcttttcagttctaaggtcatgccgccgtcttgttttttcattttatggtcaaatactgttttcggcgtaaaatcggctaccgcagctgttttaatgactatatcgcttgcgtcatacacagagagcacagcttcgcgcatatccgcagccgattgaacagggataaactcagcaaggcctttaggctgatcaagtgaaacaggcccagaaattaaggttacccgtgcgccgagctgaacagcagcctccgctagtgcgtagcccattttgcccgtcgatttattggtaaaaaaccggacaggatcaaccgcttcccgcgttgggccggctgtaatgaccacatgcttgccttctaaaggagcggatgtttcttcagcaaaatgtttttcggccagctttacgatgttttccggctcttccaatctgccttttcctacgtaaccgcatgctaaatagccctcacttggctcaataaaacgataaccgtcctgataaagaacagaaatgtttcgtttgactgccgggtggtcatacatatgaacgttcatcgccggcgcgatccaaacgggagccgttgctgccaacaatgttgtcgtcagcatatcatcagcgatgccgtttgccagttttccaatcacattagccgtagccggcgctacaataatcaagtcggcccagtctgcggcatcaatatgagaaatgacgcttggattttgttctttaaatgtatctgtatagacttcgtggcggctcaatgcctgaaatgtcagcggtgaaacgaatcggcaagcggattcagtcataatcactttgacatttgctcctgcctgaaccagcttgctcgttaacgcacaggctttataaacagcgatgcctccgctcacgcaaagtaacacatttcgattgtttagcaatgaattctccccctctgcactttacaaaaccgcacggaaaaaaataacaacctacatgtgatataggttgctacttgtgctactattcgcggtcttccttttcaaacgaaagcaggcctgcatcaatttcttctaaagctttgcctacatatttgtgtgaaatcgtatgttcaatcatttggtcttttttgatttgcatttcacgtgcgcgtctcgcagaaacagtcaccagcgtatattttgaatctaatttattcattaaagaatcaattgacggatctaacattgattattcaacctccagcattttcttatatcttggtgcaacgcgttcacgcttcaaatgttcagcaagaacgattgctttgattttatcgcaagccgtttcgacattatcgttttcaacgacatagtcataagcatccatcatttcgatctcagcttttgcggctttcattcgattttcaatcagagcgtctgtttctgtgcctcgtgtcacgattctgtttttcagttcagaaaggcttggaggcgcaaggaaaataaataggccttccgggaaagcatttctcacttgaagagccccttgaacttcaatttctaaaaagacgtcttttccatcttgaagcgtctgttcaacataatcgactggcgtgccgtaataattgccgacatactctgcccattcaagcagcttgttgtccgcaatcatttgttcgaattcgtctcttgttttgaaaaaataatcgactccgttcacttcgccctctcttggacttcttgtggttactgaaatcgaatattcaaattttgtgtcttcctgcgaaaagatcgcttgtcgaaccgttcctttaccaactcctgagggacctgagagaacgattaataaccctctttctttcatgcggcaattacccctgcccttcatccataatttcttctttaacagaaagtctgtgtgcaactgtctcaggctggacggcagataagataatgtgatcactatccatgacgacaactgcacgggttcttcgtccgtatgtagcgtcaattagcattccgcggtctcttgcatcctgaatcatccgtttgattggcgcagactccgggctgacaatcgaaatcatccgattggcggagatgatattgccaaatccgatattaatcagtttaatcgtcatcttctacgttccccctgtaaaatagacgtctctagtttagcctagtaagaccgtctgtaaacaatacgcacagtcactattctatattttgcacttgttcttttattttttcaatagaacttttcatttcaacgacaagctttgtgatctgatgatcatttgcttttgagccgatcgtatttgcttcccgattgagctcctgaacaagaaagtcgagtttgcgcccgacagctccgccactagctaatatatcacgaaactgggcgaagtggctcttcagccttgtaatctcttcagtgatatcagagcggtctgcaaaaatagcgcattctgttacaagccggctctcgtctaatacgtcttcagtccattctttgattctggcgtacagccgttcccggtaacgagatacgacatctgcagccagcaattcagtttctctcaccagctcttcaagctgatcaatatgcatcaggcagtctttcgctaagagcagcccctctttttcacgcatttcacagagaccttttaccgcttcttctgcagcatcgatgatcaacgcctccagcttgtcattttgcgtctgttcttcatgaatctggacgacatgatcaagcttaaagaaatccattacatcgggctctgcagacaattgataccgcttcttcatatctctcgcggctgcgacaaactcatcgagcagcggccaatcaatttcaagccttttctcaacaagcatatcgctgtcaacagatacgaaaagctcaattcttccgcgctgaatatgctgcagaatggtctgtttcagcttatcttcaaaatatagcaaaggccttggcaaacgagcgttcacttctttaaatctgtagttcacagatttaagttcaacgcttacagagagatcgtcttgtgttttgcttgcactgccgaagcctgtcatacttcgtatcattttaaaacacccaattcttccctgttctcataataaaagggcaatagacacgctattacccctaagattatatcatatgaatttatttttttcttgttaaaagtgaccccgccagcaaaaaagtagggatcgcggacataccgatgacgagcatccaatcccccggcgtgatggctacagtatggaaaatcggctgaagcggcggatagtagattactacaagcatcagcaaaatggatgacaataccgcgccgattaaatacaggttttgaaacggatttctagagaaaacagaagtttcgctgcggcagtcaaacacgtgaataagctgagcgagcaccaatgtggcaaacgcgatcgtctgggcataagccaagttttccggattgcggtggtacacaatgataaacgctaaaatagtggcaactccgattaaaaatcctctggaaacgaccttccatcctagcttgcgggcaaataccccttctttcggatgacggggcttgcgcttcatgacatctccttccggctgatccatgccgagcgccattgccggcaatccgtccgtcaccaagttgacccacaaaatctgaatcggaacgagcggtaaaggaagggcgagcagcatcgcaaacagcatgacaaggatttctccgacgttagacgccaacaggtatctgataaacttcctgatattttcgtagatgttcctgccttcttttatcgccgatttaatcgtcgcaaaattatcatccacgagaacaagagatgatgcttctttggccacatctgtcccggtaatgcccatagagacgccgatatcagcttgtttaatggcaggagcatcattgacgccgtctcccgtcatcgccacaatatgcccgttctcctgataggcttttacgatttttagtttatgttcaggggaaacgcgggcaaatacatacacatcctccaccacatgagaaagctcttcttcagaaagttcattcagcatcttgccgtccatgattttgccgcttttcggaaggaggcgcaagtctttcgctatcgctttagcggtttctacatgatcacctgtaatcataacggtcttaattcctgcttcacggcattcttttatcgcctgcctgacttccggccgcgggggatcaatgatacctgaaaggccaagcatggtcagatctttttccgcctgctccattgacggtgtttcgcctgcttttatcggcctgtaggcgaccgctatcgttctgagtgcctgtgatgccaaatgtcttaataccgcctctgtttctgcttttctttcatttgaaaaaagagccgctgagccgtcataataaatacgggaagatcgctgcatcagtacatccggtgcaccttttgtaatgatatagcgctttctgtcttgatcctctacgatgacagtcatcattttccgtgcagaatcaaacggaaattcttcgatcacccggtagtttgattcaacaaactcctttgaaaaaccgccttttcttgccgcggtgagcagcgctccctctgtcggatctccgtcaagcacatattcgccgtctcttttctcaatattggagttgttacaaagcgctccgaacagaagcatctgctgaagcggcttatgttcattgacactgatctctttttcgtttagtgtgaagcttcctttcggttcatagccggcccctgccactctccatgttttccctccggaccagacatgtgtcaccgtcattttgttttgggtcattgtccctgttttatctgaacaaatgatagacgcacacccaagcgtttcaacagcaggaagctttctaacaatggatttttgtttaatcatccgctgtacaccaagcgaaagcgccactgtcacaatcgccggcagcccctccggaatagcggctaccgctaacgagacacctgctaaaaacatactgtacagatcatgaccctgaataacaccgacagcaacgacaagtacggtcagaagcaatgcaacaacaatcaaaatcttcccgagctgctccagtcttctttgcagcggggttgacaatgtccctgccgattcaagcatgtcggcaattttccccatagccgtattcattcctgtcccgacgacaacccccacaccgctgccgcgggtcacaatcgtacccataaatgccatattggtaatatcgccaagtgaaacatccggttttttcaatttatcagcatgcttcacaaccgggattgattccccggtcagcgctgattcttctatttcaaggcttctcgcttcaacaattcgaacgtctgcgccaattctgtccccgctcgtaaatttcacaatatcccccggcacaagttccttagaaggaatctttgtccagcttccttccctgagtgccatgacatgcggtgttgaaagctcttttaaagcctgaagagattgctcagcacgcctttcttgaaagaaaccgagtatgccattcacaaacacaatcgcaataatcgcaaccgcatctacatattcaccaagaaaacctgagattaacgttgccgccagaagaacaagcaccataaaatctttgaactgcgcgaaaaacaagagaagcgctgaagtttttttcccttcttgcagctcgtttggtccatgcttgtcaagacgtttttttacctctttttcagttaatccttgtttcatggacgtattggttgcctctagtaaatctgtttgtcccatttcatgaaacttcattccgctcgtccactcccctgctctcttatagagatatcactctataagcatgcttattctgactcgtcccatttcatgctataattatcgaatgcaggaagaatgagagggtgtattgcatatgtcgtttgatggcatgtttacatacggaatgacacacgaacttaacgagaaaataatgggcggacgaattacaaaaatccatcagccatataagcacgatgtgattttccacatccgtgccaagggaaaaaaccaaaaactattattatcggcacatccgagctattcacgggtgcatatcacgacacaagcttatgaaaatccaagcgaaccgccaatgttttgcatgttgctgagaaagcatatcgaaggcggattcattgagaaaattgaacaagcggacttagaccgcattatgatttttcatatcaaaagccgaaacgaaattggcgatgaaaccgtacgaaagctttatgtagaaattatgggccgccacagcaatatcattttgactgacgcagcagaaaatgtgatcatcgacggacttaagcatttatcaccgtcaatgaacagctaccgtacagtactgcccggccaagattataagcttccgcctgctcaggacaaaatatcgcctcttgaggtgtcagaagatgatattttgcgtcacctcagctttcaagaaggaaggcttgataaacaaattgtcgaccacttttcaggcgtgtctccgcttttcgccaaagaagcggttcacagagcaggccttgccaacaaagtcacactgccaaaagcgttgctggcactgtttgccgaagtgaaagagcaccgtttcattcccaacattacgactgtaaacggaaaggaatatttttatttactggagctgactcatctaaagggcgaagcacgccgttttgattcattaagcgaactgctcgaccgtttttatttcggaaaagctgaacgagaccgggtcaagcaacaggctcaggatcttgagcgttttgttgtgaacgaacggaagaagaatgccaacaaaatcaaaaaattagagaaaaccctggagtattcggaaaacgcgaaggaatttcagctttacggagagcttttaaccgctaatttatatatgctaaaaaaaggtgataaacaggctgaggtcatcaattattatgatgaagaaagcccgacaatcacgattcctttaaacccgaacaaaacgccttctgaaaacgcacaggcctatttcacgaagtatcagaaagcgaaaaattcggtcgcagttgtcgaggagcaaatcaggctggcacaggcagagatcgaatattttgatcagctgattcagcagctttcgtccgcttctccccgggatatcagcgaaatcagggaagagcttgttgagggcaaatatttacgccctaagcagcaaaaaggccagaaaaagcaaaaaccgcacaatccggtgttagaaacatatgaatccacctcaggcctgactattttagtgggtaagaacaatcgtcaaaatgaatatttaacgaccagagcggcggccagagacgatatctggcttcacacgaaggacattcccggctcccacgttgtgatcagaagcagcgaaccggatgagcaaacaatcatggaagccgcgacaattgcagcttatttttcaaaagctaaagattcaagttcagtgcctgtagattatacaaaaatcagacatgtcaaaaaaccaaacggcgcgaaacccggtttcgtcacctatgacagccagcataccgtctttgtcacgcctgatgctgatactgtcatcaagctcaaaaaaagctgagccgcataaagaaaagccagagcatttgtatgctctggcttatttctttcttctcacctgataaagcctgttcacttcagcaataaaatcgccgtcaatcagcttatccacgttttcagcaagctctttcgtgtgctttggactggctccgcttgtagaaacagacacagtgacatgccctctttttacgattttcggcatatatacattgccaagctcagcgtcactgacacaattgacaagctgaaaaggcgaagcggattgggcaatttctttattcactgccgcattatccgtcgcagcaataatgaagaaagcattgagataatcttcttttgcaattgtccgtttttcccatttgatacgccgctcttctgccatttgcttgatttccggttcaacatccggactgacgagcgttatatcagctccctcagaaatcaccgttttcagccttctgagagcgatgctgccgcctcccgcaatcacaaccttcttcttttccaggctaatgtgcagcggaagcatatgaacctccatcaaaatcaaattgtccctcagaatttgccgcagtttctctcacacggttcaaaaatgcgtttttcacatgaggatgaaaaccgatataggaagagaggtagacgttcggattatgggcttttaatttctgaacctctcgttcgatttcattcatcagcatacccgtaaaaagcaaatatggaacgataaaggttgttgtgccgtcatcttttttaagttctgaaaaaacctctttgtaattagggccgcatgctgtcaaaaagcacggaatgacttccttgactggaaccatttcctgaagaagattagcaattccggttacgtctcttttgacatctggatctgaacttccccttccgatgagcaccactctggcattttcatacggaacacctatgtctttcattcggtgatatacagccttgactacttcttcgtcaatcccgatcggctttccgtatgaaatgcggactgatggatatcgagatgcaacacggacaatttcttccggaatatcatgttttgcatgcgcagctgttaaaagaagcagaggcaccactgcgatatgagtggcgccttgcttcacacatgcttcaaatcctgtctcaattgtcggctcctgaagctctaaaaagctgatttcttgtactggcacagagatgtgggccttgcatccttccaaaaaggctgcggcttcttgctgcgcttttttgacccggctgccgtggccgacatataaaattgcttgtttcatttttacaacgcctcgcttaaatcttgttttttcagttcagattcaaaccattccagcttatagtgataatttacaacatttccaatgacaattaaactcggatttgtaatgttttcttttaccactgtttctgaaagggtgtcaactgtacaaaaaacagatttttgcttgtccgttgttccccaatgaataaaggctgccggcgtagaaccgtcccggccgttttcaaggagttttctttcaatctgctgcacgtttttgatacccatatagatgacaagtgtatcaattcctgtagccagcgctttccacttttcctcaaaatcttcttcttttttataatgacccgttacaaaagcgacgttagagcccgcctcccgatgagtaacaggaatcccggcataagcggctgccgcgattccagacgtaatgccagggatgatttcaaacggaattccattttcagagaggcattccgcttcttcccctcctctcccgaacacaaaagggtctccgcctttcagtctgacaaccattttccctttttgcgcatacttcacaagaaatcgattgatggtttcctgcttcatcgtatgaaaatctggaagcttcccgcagtagatcaggtctgcttgctctttggcatattgtaaaatctctttatttactaatctgtcatataagatgacatcagctttttcaatggctttcagcgctttaattgtcagcagatcagggtcaccaggacccgctcctacaatatatactttccccatcgtatttcccccgatctattcgagttcttccagagcagtcgctgtgatgatgttctcgcttgcattccggcatctgagaagaacgcagcagatcatattcagctcaatttttgtttaacaaactcgatcagctgatttttacacgcttcacgatcatgctgtcctgaatcaagaacgagctctggagcttccggttcttcataaggagaatcaattcctgtaaaaaacggaatctcgccgtttcttgcttttttgtaaagccctttcggatctctttgttcacaaatatcaaggtcgcatttaatgtagacttcattaaattcgcccgcttccacaagctcgcgaacctgttgtctgtcctcgcggaaaggagagataaaagcagtaatcacaatggttccctgctgaacaaaaagctttgccacctctccgattcggcggatgttttcttttcggtcttcatcagaaaaaccaagatccttatttaagccgtgacggatattatccccgtccagcacaatcacttggtagccttgctcaaacaattctctcgcagcggcgttggcaatggttgatttgcctgagccgcttaaccctgtcagccagagaatggagcttttatgcttgtttttttgctggtactcttcttttgtgatagaggcttcatgccatacaatatcgcgatttgtcactgccagtcctccttaagatacgcctacttcttcttttttcttcatccctttgattaacacttctacgacttcttttcgactgaattcagcaggcggcagcacaccgtctctcagcatgcctcttaccttagtgcctgataaaatgacgtgatgctctctgccatgagggcatgttttcgctgttcccatatttccgcattttttacagaagaagctgtgctcaaatttcagcggtgtaattccgagttcttcaggtttaaatgtgtcaaacagctcctgtgcttcgtatgttccgtaatagtcgcctacacctgcatgatcacggccgacgatgaaatgtgtgcagccgtagttctttctgacaagcgcgtggaaaattgcttctctcgggcctgcataacgcatcgccgctaaaaagacaccaaggaaaacgcgatctttcgggtaataatgatcaagaagcacttggtagctttccatccgtacatcagctggaatgtcatcagattttgtttcacccactaacggattcaagaacaagccgtctactgtttcaagagccgttttttgaatgtattcatgcgctctgtgaacagggtttcttgtttggaaaccgacaatggtttcccagcctttttccgcaaactggcgtctcgtttctgacggttcaaatgtaaattcagagaactgttttgaagcttttttaatcaacgtaatcggcccgccgacatatgtattgccgcggctgaacagctttttaacaccaggatgctcctgttcatctgttttgtacacattgactgcttctttttgtttgtcaggcacgtacagatcttcgatttggataacgccgtatgtttctccttcatacgttaactttaccgtttcaccaagtgacagttccgctgctttttgcgcatcgaccggaagcgtgatcggaagagaccagacaacgccggaagaaagacgcatgttttcgacaacagatacgtaatctttttcattaaagaaaccttcaatcgggctgtatgcaccgataccgatcaattccaaatccgcgaaagaaattaaatcaagttcaatttctttttgaatgccgctcacatcatatgattcatctactctgtttactaatgttcctccgtgtggtgctaagctcataatatccatctcctcctagttaacttataaaattactcagattaatgatcagattcccccgccttgttcgtggactgagcgtctctctttacgaatggcctttgtcaggctgacggcaccgcccgtcgctaaaagcacacttaccatgataaagatcgaataataatctgcttttaaaaacaaggatacaagcagataagaaatcgataaagataaaaacggcgatacgatccataccttcagcatcgtttgaacaacttgtttatggaacacgttcggaccgttttttgccatgcctattccgataatagacgatgacgtgacttgcgccaagggcaccggcatcccaaatacagaactgatgatcaccagtcccgctcctgtaccggataagagaatgccttcccctttggagaatctcgtaattttcttcccgtttgtttctagcactcgccggcctaataacagtgcgccaagagcaacaaaagctcctccatacaaggttccttttccgacatcaagcacatcggcagctactaacgggccaacagcattcgccacgttattcatgccggcagagaatgcttcgaaaaatccggcaactaacaaaacaatgccgaggattttttgttttttagaagattttacttcaatcttaaaataacgaaacagcttagatacgaaataggtgaagccgaaagcgaacagcgggacaaaaacccaaaatgacacaatgatcagaagattgttcacaaacaatactttataagccactcccacgccgacaaccgcgccgactgttacttcacttgtcgacaaaggaatgccgagcaggttagcagtaaagagcgacagggcagcagctccaataatgatgcaaacaatcgtcagtgtaatcgtctgctcaggaataatgccggagctgattgtttttacaacctcgcctccgccaatgaccgcccccgcaaagacaccgactgcgcataggatcaaagcgtaggttttctttttgatggctccggagccgtaagcaacccccatcgaagctgcagcgccgcttgcaccaatattcatcgcgaaaaacaagctaaataaaatagcggctaattccattttgcagctccttattcatgcagtccgcattctgttttcgccataccattccatctgcctgagcgcaaatcctctgccgtaaaagcgggagcagtgcaaggcgcacagccaatacttggatatccttggtcatgaagcggattgtagtccagttcattccgggatgtgtatctccaaatgtctttccaagtccaatggataagcgggcaaacttttactgacttgaatttttcatctttgtttaagaaattcgtattggcacggcttggcccttgatcacggcgcaggccggaaagccaggctggatgtcctgaaagcgtctctcttaaaggaacaacctttctaagatagcagcactgattcggctctctttcccacagtttgtcaccatgttcttcggcttgttcctcaagggtgagatctggttttttcaggatgatattaagacccggataacgctctttcactcgttcaattgtttcataggtttctttaaaatgaagtcctgtatcaagaaacacaatctctgcgtcttttttcactttataaattaagtcaatcagaacgattccctcaattccgaaactgcaggcataaacaagctgatcgccgtaatggccgtatgcccattttaaaactgacagcgctcctttataaggatcgtcttccggaaatgtaatcgttggttcttcccaattatcatacgttaacatttcttctttcctcctttcggagacaaacaaacagtagctttctgccggttgtcttttcccatgtaatgtgattcgcggctgctgatatacagatagcctttttacctcttaaaataaaaaactttcaatccggcggaaagaaagacaggaacagcatgcagcccttatctttcaaaatggaattcattttgctggaagtagcaccttacaaactatgcaggttgccgggcttcataggtccagtccctcagccgctcttgataagtttttagatttgtagtaaattttagcacaattctaacataagtcaacccgactttttttataggattaataaaaaaacaggcctcacagcctgttttcaagtacatcaaggctttgaagcctctttatatcatttgaatttattttttattttttaaaccaatcttttgactcgggatttcgtttccatgtttgcagcttttttagatcatctgaatgaatatttccgttttcaagcgcgacctctgtgagcgtatcataatcggttaatgagtagtatggcagttctgcctttgcgaaggcttcctccgctttaggaagtccgtacgtaaagattgagacgacaccaagcacttcacagccggccgcttgtaaagctgcacaagcttcaagcacgctgcctcctgtggaaattaagtcttcaatgacaactgttttttgcccctcttgcacagctccctcaatctgattgccttttccgtgcgccttcggcttgctcctcacataacacatcggaagattcaaacggtcagccgcaagagcagcatgaggaataccggcagttgctgttcccgcaatcatttcagcttcaggaaaatgctctttgacaagcttgctgatacctgaagcaacatcgtttctgacctctgggaaagatagcgtaaggcggttgtcacagtagatcggtgataaaatgccgcttgcccatgtgaacggctcgttcgggcgtaaaaatacagcttggatgtctaatagatgttttgcgatgatttgtttcaagatttgattccctcccattcaagtctgacagccttataggcttttaccgggtcttccgcttttgtaatcgagcgtcctactacaatcgctgatgaacctttctctcttgcaatggcaggcgtcgctacgcggacttggtcattcgcagcgtcctctgacattctgatccccggagtgacagtcagaaatgaaggcgacaccgcttggtaaatggcttttgcttcatgaacagagcagaccactccatccagtccgctttcttccgcctgtttgctgtagtgcacaaccgtatcaatcagagacttttcgatcagcagttcatctttcatgatttgttcagatgtgcttgtcagctgggttaccgcgataagtgacggacgtttttttccagccggcgtaccttcttctaagccttcgagagctgcctgcatcatttttttgcccccggcagcatgaacattgacgaggtctactccaagactggcaaggcgcttcatcgctttgtttacagtagtcgggatgtcatgaagctttagatctaaaaatagctcgcagtttctttcttttagttgtttcacgatagatggcccttcttgataaaaaagctccatcccaacctttacaaataacggttcttgctgaaaaggcgctaagaacgcaagtgtttcttcagctgacgcaaaatcaagcgcgatgatgggcaggttgtttttcatgattccagctccttccgatgcattcttcaattgattgatagccgtattggagcaaaacagatgggagctgttcaataatctctggacatgcaaaaggattcacaaagtttgctgttccgacagcgactgcgcttgctcccgcgagaagaaattccagggcatcttcagccgtttgcacgcctcccattccgataatcgggatgtttaccgcctggctgacttcatacaccatgcgaatggcaaccggcttcacagcagggcctgaaagtccccctgttttattcgctaatatcggtttgccggtttttaaatcgagtctcatgccgattagtgtgttgatcatcgtaagaccgtccgctcccgcttcctcgatcgctaaggcaatttctgtgatattagccacgttcggggaaagcttcacataaacgggtacatccgaaacctctttcaccgcttttgtcaaatcggcagccatttcaggattcgtgccaaaagcgattccgcctgttttcacattcgggcaggaaatattcaattcaagtgcatgaacattaggcgctttgctgatatgctctgcgacttcaacataatcctcgacttgagaacctgcgacattggcaatgatcggcgtatcaaactgctcaagccacggcagctcattatgcaacacgctatccagccccggattttggagaccgatcgcattgagcattccagcaccagtctcagctacccgcggcgtcggattcccaaagcgtggctcctttgtcgtagccttaatcatgatggctccaagacaagacaaatcataaaaacgtgaaaattcttttccaaaaccgaagcagcctgatgcaggaatgattgggtttttcaaatcaagtcccggcaatttcacctctagcattacagcgccacctcctgagctttaaatacaggcccgtcgagacatacttttacataggatgtctcactttcgtttgtatggcacacacacgcgaagcatgcgccgattccgcagcccattcgttcctccatggacagatatacttctttatgggcatattcctgttttaacgccttgagcatcggtgtcggaccgcagctgaggaggatatcaaactctagatttttccgtttaatcacatctgtgacaaatccggtttccccgtagcttccgtcagctgttgccacatacgtgtctccgtactgccggcattcttcctcgtaaaaaacatcctttgccgattggaatcctaaaacgtggatgacatttacccctttttcaatcaagcgtttcgacagctcttggagaggcggcacacctactccgcctcctaccagcaaagccgtctttccgggttgaacttcattaacaggaaagccatttcccaaaggcccgaggacatccacaagttctccctgctgcttcagtgacaagagtcttgtcccttccccatctacccgataaatgatggtgacttcatttttttcaaagttgacgtctgcgatgctgatcggccttctcaaaagaggcgtaaccgcttcgctcactttaagatgaaggaactgtccaggggttgtaaacccttggacaagctcccctttcagaaccatttgaaacacccggtctgcaatttgctggttagaacatactgtcaaatacgcttttttcatatagtgactgccgcctcctgatttgtgttgactgccggcatttgatcagcacggaatgtcatgctttccagcactcgcaatatcgcctctgccgtatctaaagatgttaggcaggcaacaccattttctactgattcacgtctgattctaaaaccgtctcttgccggctgctttccttttgtcagcgtattgatgacaaactgcgcttctccgtttctgatgacgtcaagcaagttcgggccatcctgaccgatttttccgacgaccttcgctggaatggaagcttctttcaagtagcctgccgttccttccgtcgctaaaatgttgtagccgatcgcgtggaaccgcttagcaatggcaagcccttcttctttgtccttatcagctactgttaaaagcacggaaccgtagttcgggatttgaatacctgaagcaatcaaggctttgtagagcgccttttcaagtgtcgaatctttccccatgacttcaccggttgatttcatttcaggccctaacgtaatgtccactcttctcagcttggcaaaggagaagaccggcgcttttacaaatacaccttgctgttcaggctgaaggccctctgtatagccaaacgcagccagcttttgaccaagaatgatttttgttgcgagattcgccattgggatacccgtaattttgcttaaaaacggtacggttctgcttgatctcggattcacttctagcacgtacacctcgccttgcgacaagacgaattgaatattgagcaaaccgacaatattcagccctttagccaatgcgatcgtgtattgttcaatttttttcttaatgtcctctgtgagagactgaggcggataaacagcgatcgagtctccggagtgaacgcccgcacgttcaatgtgctccataattcccggaatgacgactgtttcaccgtcggatactgcatcgacttcaatttcttttccggtcaagtatctatcaattaatacagggtgctgcggattgattttaactgcgtttttcatgtaatgaagcagctcttcttcatgatacacaatctccattgcccggccgccaagtacataggaagggcgtaccagtaccggataaccgatatcactcgcgatgcttaccgcctgatcaactgatgtggctgttttgccaagcggctgcggaacaccaagttctccaagcgcttgttcaaatttatcccggtcttctgcacggtctaaatcttctaatgaagttccaaggattttcactccgcgcgcagaaagctcgtcagcaaggttaatcgcagtttgtccgccgaactgtacgacaacgcctattggctgttcgaggtcaatgatgtgcataacatcttcaatcgtaagcggttcaaaatacagcttgtctgagatgctgaagtctgttgaaacggtttccgggttgttgttgacaataatggcttcatagcctgcttgtttaattgcccatacagagtgaaccgtcgcatagtcgaactcgacaccctgaccgattcgaatcggccccgaaccaagcaccatcacacttttcttatctgtaacgacagattcattttcttcttcgtatgtgctatagaagtatggcgtttctgactcgaattccgccgcgcacgtatctaccattttgaataccggctcaatccccgcttgttttctcaagctgtaaagctcagattctttcattttccactcgcggctaatgtactgatcagagaagccgagttcttttgcccgtctcagcacatccgtattgcccgcattggccttcaattctttttcaaactgtacgattccgaacagcttatgcaagaagaagacatcgatagcggaaaattcatggaggtcttctaccgtgtagcctcttctgtacgcttcagctaagtagaataagcgttcatcaccggcctttttaattcgcttttcaagaagctcatctgaaatgtcagcggcgtccttcaattcaagatgatacacatccgcttccagtgatctcactgccttcagcaatgactcttcaagtgtgcggccgattgccatgacctcacctgtcgctttcatttgcgtgccaagctttctgtttgctgattcaaacttatcaaacggccagcgcggaattttggatacgacatagtcaagagctggttcaaatgctgcatatgtttttcctgtcaccgggttcatcatttcatctaatgaaagtccgactgcaattttagcggcgagctttgctatcgggtaccccgttgcttttgatgcaagggcagatgaacggctgacacgcggatttacttcaataatgtaatattggaagctgtccggatctaaggcgagctggacgttacatccgccttcgatcccaagtgcgcgaatcagttttaacgatacattccgcaagagctgatattcgcgatcgctgagcgtttggctcggcgcgacaacaatactgtctccagtatggattccaactggatcaatgttttccatgttacaaacgacaatggcgtgatcttggctgtctctcatgacttcatactcgatttctttatagccggcgatgcttttttcaagcagacattggtgtaccgggcttaatttcaagccgttctcaacgatttcttttaactctgtctcattcgagcagatgcctccgcctgttccgcctaatgtatatgccgggcggacaatgacagggaatccaatttgactgacgaatttttctgcttcttcaagggagtggataatctcactttcaggcaccggttcattcagttcattcattaatgttctgaacaagtcacggtcttcagcttgctgaatcgcagacagttttgtgccaagcacttcgacgccgcattctgccaaaacgcctctttcagaaagctcaaccgcaagattcaaaccagtttgacctccgagtgtaggaagaatggcatccgggcgctcttttctgatgattcgtgtcaggaattcaggtgtgagcggttcgatgtaaacccggtcagccatttctgtatctgtcatgatcgtggcagggtttgagttgacaaggatgacttcataaccttcttctttcaaagcaagacaagcttgtgttcccgcatagtcaaattccgctgcttggccgatgatgatcggtccagatccgattactaaaattttgttaatgtctacgcgttttggcataccgcttccccttctttctctgttgtttcgatcatttcgatgaatctgtcaaatagatggttggcatcctcaggaccaggtgaggcttcgggatgatattgaaccgtaaatgccggcaatgttttatgcttcagcccttcaatcgtatcgtcgttaattgcgatatgcgtcacttccagttctgttttactgatagacgaaactgtatatccatggttttgagatgttaaggcaacttttcctgtagccagctcttttaccgggtggtttgagcccctgtggccgaatttcattttttcagtattcgccccgcacgccagcgcgaataattggtggccgagacatattccgaataatggcacttttccaagaacacctttaatcatttcaatcgcttcaggcacatccttcgggtctccaggtccgttagaaagcatgataccgtccggtttcagctgaagcacctcttccgctgtaatgttgtaaggcacaacgatgacgtcacatttccgtttgttcagctctcttagaatcccgtgtttcatgccgaagtcaaccaagacgatgcgtttgcctcttcccgggctcggatatgctgtttttgctgatacttgggatacttgatttcttggcaattccgtttcgttcagtcttttcagcactgcttcgatatcttcatcagatgaagcgaatgttccttttagcgcgcctgccgtgcggatcattcttgtcagcttccttgtatcaatcccctggagtccgggaatgtttttcatttttaaatactcgtctaaggtgtatgctgaacgccagttggaaggcagctcacataattctttgatgatcagccctttgacaaaaggggtaatggattcaaaatcatcacggttaatgccgtaatttccgataagcgggtatgttaatgttacgatttgtccgcagtaagaaggatcagataaaatttcctgatagcctgtcatcccagtattaaaaacgacttctcccatgttgtgttctaagcttccgaaggcttctccctcgaataccgctccgttttccagtactaatcgtctcttcatttgacaagtctcccctcttcataagcaagcttccctgccgcaattgtagcgaccggccagccggtgcagctgatgccgttgaatggtgtattttttccttttgataaaaatgtctctttgtctataactgcttctttttctaaatcgattaacgtaatgtccgcagcttgccccgtttgtaatgttccatatgggagaccgaacgcttcgcatggcttgattgtcatgtagtcaatcagctgcttcagcgaccagctgccatttttgacaaagtgtgtgtaaagaagcgggaatgctgtttctaagccgacaattccgaatggcgccagtttcatttctgtgtttttctcttcttccgtatgcggtgcatggtctgttgcaataaaatcaattgttccgtctaaaagaccttcaattaaagcagctctgtcttctgcgctgcggagcggaggattcattttatagtttgtgtccagccccgggatgtcctcatcacaaagcagcaaatgatgcggcgacacttctgctgtcactctgattcccgcttttttcgcatcgcgtacgaccctgacagattcttttgtactgatatggcatacatggtaatggcagtttgccgcctcagccagcagcacatcgcgggcaatatgaaccgattcacacacagaaggtatgccgtttagcccgttcgctttggagaatgtcccctcatgtacgcttcctccgtaaattaaggagttgtcctcgcaatgtgcaacaatcgccttgtcaattgcggctgcccgtttcatcgcttcatacatcatgcctgctgtctgtataccaacgccgtcatctgtaaaagcaaatgccccggcttcttttaacgcttcaaagtttgtcatttcatcgccgatttgtctgatcgtaatggatgcatatggaagaactctgacgcatgatgtttctttaattctgttttgcacccattccatctgctcctttgtatcaggaaccggccgcgtattcggcattgctgctactgtagtatagccgccgcgtgccgccgctttggccccggtttcaatagtttcttttttctctccgcccggctctctgaaatgcacgtggagatcaacaaacccaggtgaaacgagcaaaccttttgcatcaattaccgtttcattatccgttgcatcaagcttgccgattgcggtgatggtttctccagtcactcggatatccgcttctgttttttcaccattttcgtttagtatccagccgtttttaatgagatatgacatacgctgcttctcctcttttcacattggtttgtaaggcacgctgtatcactgccattctgataaatacgccattttgcatttgcttgaagattcttgatttttcgctttctactaagctgtcatcaatctccacccctctgtttaccggagcaggatgcatgatgatcgcatgccgcttcatacgctcagcccgttctacggtcaagccgtatttgtttaaatagccttcctggctgacagcggattgatgtcgttcattttgaatgcgcagcagcatgacgacatcggaagactcaactgcttcatccattgagacatacgtaccgaatgtattttcttcatcctgccattccgaagggccggaaaataggacccgggcacccaatcttgtcaacacttccgcatttgaccttgccactctgctatgcttgatgtcgccgtgaatggagacagtaagccctttgaacgtattgaactcttcataaatcgtcattaaatcaagcagtgattgtgttggatgctggccgcatccgtctcccgcattcagaatcggaatattcacctggctgacaagctcttcataatactcatcctcactgtgcctgatgacgcagacgtccacaccgattgattcgagcgtccggatcgtgtcatataaggtttcgcctttttgcacgcttgtgcttgttccatcaaggttgagcacattcatgcccagctttttttctgcgacctcaaagctgaaccgcgttctcgtgctcggttcgaaaaacaggtttgcggcaaactttcctgtaagctgattgtctgtttttccgcttttgagatcttgtgctttttgaagcaaatctttgatttcctcagtgctgagttcactcatcgtcgttaaatgcttcatgttctttcccctctcttttcaacttaaggctgaaaaaaaccccggtctaagatagactcggggtatggttaaatagagggcagcattgaagcttccttctcttcataacccttccaagcctctctggactttcattaaaaggttttagatatgatgttcagatgtgtctgtctgctcttccttcgcctgcggaagaatcaggtttaagatgacaccgacaattgcggcaagcgccattcctgacacttggaatccgccttgagacacttggataaaagctcctcctacaccgatgacaaggataactgatgtaataatgaggtttctgttgttttcataatcaattttgttgtcaatcagcattctcaggccgcttgaagcaatgattccgaacagcaggaaggagacgcctcccatgaccgctgatggcactgaactgatcagcgctgaaattttgcctataaagccgaagcaacaagcaatcactgccgctcctccgatgacaaagacgctgaatactcttgtgatggccagtacgccaatgttttctccgtatgtcgttgtcggcggaccgccgatcagggaagcgaggattgtcgccacactgtcacccataatagagcgatgaagacctggctttttaatgaaatcttgtccgacaaccttgctcagcaccatttggtggccgatatgctctgacattgtgacaaatgcgacaggaaccattgcggctgcgatgccgagtgtaactgacggtgaataatctttgaacggaatgataaattcaggcactgcaaaccatttcgcgtcaagcaccggctggaagttgacaatcccttgagtaagggcgaacaagtatccgccgatgattccgatcagaaccggaatcaggcttaaaaatcctcgtaagaaaatcgcacaaataatcgtaattgccagcgtaactcctgcgacactaaagtgctttaagctgtagaccaactcactcgcgtttggatcagcatacatcgccatgtttaccgcagtgcttgccagtcccagcccgatgacgataataacaggccctacgactacaggcgggagaatcttcatcagccatcctgttccaagctgcctgatcaataaggcaatcagcccgtacaccagccctgcaagaaacgctccaaccattgccgctcctggcccgccggtcgcttttaccagaatgatcggagaaataaaggcgaaggatgaaccgagatacgccggaatttgccctttcgtaataagaaggtacgccagtgttccgatgccgcttgtcaccaacgccacagcaggactcattccgacgagcttcggaaccaaaatggttgagccaaacatggcaaacaaatgctgaaggctgaatgaaacccaagagaaaggtgtcgggacatccctgacccctaaatttacttttttcttactcatgatgatttccccctgattgttgactttcattttaggatgactcaatgactgtataaaaaaacctctttgcttttttacgcaaagaggcatacaaagacctgccgaatactttttgggcctttgttgtgcacctctttgcaacctctctggattgcccttaaaaaggtgatttattattcgttttcataaatggcgacgagatcgttttggtctacctcatcaagctgaaccataaccttttcagactttgatgtcgggatgtttttcccgatataatccgctcggatcggcagctcccggtgtcctctgtccacaagcactgcaagctgaatggaggaaggtctgcctacatcaacaagcgcatccattcctgctctgactgttcttccggtatacagaacatcatcaacgagaatgactttttgatctgtaatatctaccggaatatctgcaccttttacaagcggttcatcgttgcttgtttttttagaaagatcgtctctgtaaagagtaatatcaatttcaccgactgtaacaggatttccctcaatctgttcaatgcgttccgcaaggcgttttgccaggtaaatccctcttgtcttaatgccgacaagaatgcagttattcattcctttattgcgttcgatcatttcgtgagcaatcctggtcagcgcccgtctgattgcctgttcgtcgagaatgacagctttttgattcaatgtgtgacacctcacagttcatatagaagaaaaaacccctcctgccagagcatagaggggttttaggacaaggtgcgcgcctgtacacgcatcccgtctatccgttatccttctcagtctctctggactgttttaaagaatctattcagcttcgtttattatttcagaaaagaaaccctctgtcaaccattttttctgaggttttcgattaattctgccatatcctcaggaagcggcgcttcaaattcgacatattctcctgttcgtggatggtcaaaacctaaaactcccgcgtgaagcgcttggccattaaagtcgattgtttttcttgggccgtatttcggatcgcctgctaatgggaagccgatatatctcatatgaacacgaatttgatgggttctccctgtttcaagctggcattccactaacgtaaaatcctgaaaacgctctagtacatgaaaatgagtgacagcgcttttgccatcacgtgtcacggtcatgctttgacggtctttcttatctcgtccgatcggcgcgtcaattgtgccgtcatcgtgagaaataagcccgtggacaacggccgtatattttcgggtgaccgttttgttgaccaattggtttacgagtgactcgtgtgccatatcatttttcgccaccattaataaaccggacgtgtccttatcgattctgtgaacaatacccggacgcatcacgccatttattccggaaaggtctgtgcaatgagccataaggccgtttacaagtgtgcccgtaagatgcccgggtgctgggtgaacaaccattccgcgaggtttgttgacgaccagcacatcctggtcctcataataaatatccagatccataggctctgccaggacgtcgagcgcttccggttcgggtacagtgacggtcacctgatcacccggctgaattttataattcgctttcaccgcgcttccgttcacgacaacctgtccgtcttttacccattgctgaacctgggttcttgaccaatcattctcagacgatgccaaaaatttatcaatccgctcacttttttgttcttctgaagcggttatatcaatttgattcatgctattgctcctttttctttttcccgctgtccaacagcatttgtataaataaaagcattacgccgacacataatgaagagtccgcgatgttaaatatcgggtaattgtaattgacaataataacatggataaaatccacaacttcctgtctgacagcccgatcgataaagttgccgatggcaccgccaagcataagtccgagggcaacgccaagaaacctttgtccctttgtataacgctgtatgtaataaacaataccaataataacagcggttgttatgaggtagaaaaaccacatttgacccgctaatatcccccatgcagcacccgtattgcgatgggaggtgatatagaatacctgatcaatgatcggaatgctttggccaagttccatgttcttaacaactagccattttgtcaattgatcggctgcaataataagtagtgcaatcatataatacagcacaaacgttcctccagtttacggttactttaatccattatgcattttatcaataaaaagcactggagtaaagaaatatcaggcatattaaccggccagacactgttattcatacagtgcctgaccatattcgatatccgttgatttccatatcggaagcgtttttttttcaaattggacagaataaagaaaatcgtttgctgttcgggcagtcggcagcactgccagctttgcaagaggaatgggagccccggtttcttcacagtatccgaatgtgccgttttcgattttggacaatgcaaggagaacgtcttgaagctcttctttaatatgatagatcagagttgctttttgtttatgattgattgctgcttgcgggcttgtagaaacctgaaagcaagaatactcaaataatctcgactgtaattcttctttcatcagaagaagttccgtataaattgcggtcagttgatcattcattcttcacaactcctgctcttaacgtagtacctttattgttgcctatgaatgatgatctaaagcccataagatttttcctgccgttctaaaggatgtcactcttggcacaaaaaaagcccggcttttacgccgggcccttttcattatttttgatagtatttttcaacgatttcagcgttgcgtaatgaaagtgtaggatatttcgggtttgcacctacatcttttgaaatcacacgtgatctctcacacatttcgccttccgctttctcgacagcgattttacccgtcgcaaaactttgcgcatcgttcggcgcatcattttcttcgctgattatcagttcagacacaataaacagctgagaaaggttttcttttatggaagccaagagctccttgttttctttgtttggatacaatttcaggtttgcttccaaagatttaccgataattttttcatttcgcgcagtttctaatgcttttaacacgtcatcacgaagagccataaagcggtcaaatttttcttcagtcgcttcactgtttggaaccgcgattgtttccggcatatcggtcagctgaacgctctgctcttcaacaaatgttaaatgagaccacaattcgtctgccgtatgtggaaggataggcgctgaaagcttcactaatgcaagaagcgtttcgtagaatactgtctgcatgctgcgtctatccggatgatccgcatgctcgatgtagacaatatcttttgcaaaatcaaggtagaatgagctcaattcgattgtgcagaaattatgaatgctgtgatacacaaccgcaaattcgtactcatcatacgcttttttcactttatcaatcagcttgttcagcttaatcagcatatactgatccacttcacgaagatcttcgacagccaccgcatttgtttttggatcaaaatcgaaaaggttgccgtgaaggaaacggaacgtgttgcggattttacgatatacttccgcaacctgctttagaatggcgtcagacacgcgaacgtccgcctgataatccactgaagatacccataatcttaagatgtcggcaccaagctgtttcatgactttagccggaacaacaacgttaccgattgatttactcatcttgcgtccttctccatccagtgcgaacccatggctgagcacacctttatacggcgctttccctgttacggctactgctgtagaaagagaagagttaaaccagccgcgatattggtcagatccctctaggtataaatcagccgggcgaacgaggtcatcacgttcttcaagcactgcttgatgtgaagagcctgaatcaaaccaaacatccatgatatcctgttcttttgtaaatgtgccgttcgggctgccaggatgcgtaaagccttccggaagaagatcctttgcttctttttcaaaccaaatgtttgatccgtgctgtctgaacaattcagaaacatgttcaatggtttcatctgtaataatcggttctccgttttcagcgtaaaataccggaatcggcacaccccacgcacgctgtctggaaatacaccagtctccgcggtcccgaaccatgttgtgcaaacgctgctcgccccattcaggaacccatttggtttctttaatggcatccagcaggtctgatctgaaatctttaatagacgcaaaccattgcgctgtcgctctgaaaatggttggttttttcgttctccaatcatgcggataagagtgagtaatgaattcaagcttcacaagtgcgcctttttcatcaagctgctgtgtgatcgctttgtttgcatcatcatagaacatgccttcaaagccaggagcttcgcttgtcattacacctttttcatcgaccgggcaaagcacatctaaaccgtatttttggccgatgataaagtcatcttccccatgtcctggcgctgtatgaacacagcctgttccggcatcagttgttacgtgttcaccaagcataacgagagagtctctgccatatagagggtgttcagcgataatgttctcaagatctttccctttgaccgttcttgtcacttcatactgatcaaatccgcatgccgatgcaacattttcgactaaggcacttgctacgacaaagcggtcttcacctactgcaatcacgctgtactcaagatcagggtgcactgagattccgaggttcgccggaattgtccaaggcgttgttgtccaaatgatgatgcgctcaccgttttcaagaacgccttttccgtcttttacaccaaaagcgacgtaaatagatgctgaacgtttgtcttgatattcgatctcggcttcagccagagcagactcacttgaaggtgaccagttaaccggtttaaggcctttgtaaatgtagcctcgttttgccatttcaccaaatacgcggatttgctgcgcttcgtattccggttttaatgtcacatatgggttttcccagtcaccgcggacaccaagacgtttgaattgctcacgctgtccctcgatttgcttccaagcgtactcttcgcatagtttgcggaattccgctactgacatttctttgcggttgacctttttgttttttgtcagagctgtttcaattggcaatccgtgtgtatcccagcccggcacatacggtgcgttgtagccgctcattgatttatagcggacaatgaagtctttcaaaatcttgttaagtgcatggcccatatggatgtcgccgtttgcatacggaggtccgtcatgtaaaacaaatttcgggcggtctttcgtccgttcctgaacaagacggtagatatcctcttcctcccattttttttgaatgtcaggctcacggtttggcaaatttccacgcatcgggaaatctgttttcggcattaagagcgtgtctttaaaatccattttcattcctccactgcattttttcagaaaataaaaaagccctctcatcccataagggacgagaaagcttatctcgcggtaccacccttttagaaaaagcaagcatacactttttcctcttgagcatcgtaacgtgatgaacgtcctaacctactgtgagttcagcaaggaaactaaagggctgatctacatgattccggccatcccggactctcaccatctccgggtcgctatgaaggcctgaaggaaacatgactgtccctttcaaccgttttttcatctgaatttatgaacgtattatattcgacaagctaagaaaatgtcaagataatcagagaatttattccttttcctcaaatacagcgtcgacttcatactcaaggagatgatcccaatcgtcatttttcagaagatcaagctgagcttcaatcagcatttggaaacgtgttctgaacactttagactgttttttcagctcttcaatttccattgcaatttttcttgattttgataacgattcgttgataatgcgatcagcgtttttctccgcttcccgaacaatcagctttgcctctttttgagaattgcgttttacgtcttcagccgcttcttgagcaactaaaattgatttattcaatgtttcctcaatattggcaaagtgtccgattctttcatctagctcattgactttcgcttcaagctcagttttcttgcggagaacaatttcgtaatcttttctgacttgggctaggaattcatttacttcatcttcatcatatccgcgaaaactttttgtaaacgtcttgttgtgaatatcatttggcgttaatggcatgatgccacctccattttttacatttcagtacggttatctagttcacattataaaacaaatttcgcacagatggagaaaaaaactgaaaaaccgactatttttgtcgttcaaacgtaactctccatttgtcttttttggttttcccttcgatttttgttaagctgcaccggccaaaacctctgattgacagcatgtccccttccgcgactatgtatgaaggatcttcaaccaccttccagttcactttcacaaggccgtttttcacaagcgtctgtgatttctggcgggattgcctgctcatagaggcgcagacggcgtcaagccttaaagaagaaaccgtgtcatctcttatttcgacatcaactgctggaatgttaaggtctgacaagtcgattttctctaggctgaccgccgctttgcctgcttgggtcagctgtgcagccacaaaatcagcggtatcggctgagacaatcaattgcactgctgtctcagaaaacacgatgtcaccgaatttttgccgctttaatcctatgcccattaatgcaccaagcagagaacgatgatctactgagacaaacttgtcagcataacggacgttaaacgcctgcaattcaaaatccgattcttccggagtaatgtactctggatacagaatcgcccgtttccgctccgctctgttatagccgccggaaaaagcaagcccgacgtcagcctgtcccgtaacagcagagaggatgacctgctctcggggatctaaaaagtcggtcagcttcatccggtactgctcctggacaattcttttccattcgagcgcctgatcaataaaggcccgctcgtcttttctgaagtgctgatatatatcgctcatcgtctttcccttctatgtaaagaggcttggctgctgccaagcccctatcaaactgtcacattaaaacgcaatcatgcgataaagcccccacaagccggttgtcgcaaaccgaagcacaagtattgctacgattggtgaaatatccagcattgcaatcggagggatgatttttctgaatggttcgagatatggttcacaaatcgaagccaaaaaacgcccgactgctgtttccctcgtactcggcacccatgacataaaaatatatatgatcagggcaaatgagtatattgtgattaataagtttaaaaccgaaaaaacttgataaaggatcatctcgctttaccacctctgatgttcgtcttcagatatgagctcagaaattgtgcctgatacatctacgttgtcaggcgtgcagaggaaaatatctgagccgattctttgaatatcgccgccgatggcataaacggttccgcttaaaaagtcaacaatccgcttcgcctggtcatgctgtatccgctgaagattgacgacaactgcccgccggttcttcaaatggtcggctatttcctgcgcctccgcataaacgcgcggctcactcaacaccactttagaggatttctgaacactttgcaagctcactacattctgtttgcccgcaggtttattcccgttgtaagccggcttttctttttgctcatgctcctcatgagattcccgctctgtctcaatatattcatattcgtattcttcatcttccattgagaaaaagtttttcagtttatttttcatactcattgctgtacaccccctgtttcatttccgactaacgatgagccgattctaatataagtagctccttcttcaattgcaatttcaaaatcatttgacatgcccatcgacagttcagtacacggagcgttcggctggttcagcttctgaacctggtcacggagttctctcagcgacctgaaacagcttctgatctgatcttgatcatcagtcagcggagccattgtcatcagcccggcaacaaggatatgttcgaaaccggaaagctcctgtatgaatggaatgacttcttcttttttcatgccgtgtttagaaggctcaagagaggtattgacctgcacaaagcatcgtacagtaccttcagcccgtttttcaatttctttcgctaatgagagccggtctagggaatggatataggaaaccgaattgacgacagattttgcttttcttgattgcagactgccgataaaatgccattccggattccctttcatcaattcctgtttgcggagcagttccgcatcccgattctctccgaggcaggtgatgccagcatctactgcctcctgtgctctttcaggtgatacatatttagtgactgcaataaccgtaacttcatcggagctgcggcccgatctgttacatgcttcgtttattcgttcgtttatatgtcgtaaattatcaacaacacgcaagatcttttatgcctccttcattccgataaaggacatcatccgtccagttttcccctgatcgcggcggtgagaaaagaaaagagacggctcgctttccgtgcataaaccgctgacagaaatttgttcacttgccaaaccgctgtccatcagtataagacggttcagctctttcagatcaagctgatattgtgcctttgccgtctgattaacgacaaggtctgctgaaaccggcaatgcgcggacagcatccatgacgcggtcgtctaccgtatagcatgcaccgctgatagacgggccaataacagcgtaaatatctgagggatttgaaccttccttctcagtccattgcttcaccatttctctgccaatctgtttgacggtgcctttccacccggcatgggcgactccgacaagcgacttaaccggatcataaaagaaaagaggcacacaatcagcaaagcataatgctaaaaatacatttttttcatttgtatagagcccgtccgttgcttttagagccgtgtgatactcacgggcgccttttcccctatccctctgcgtcactttctgaacgcgattatcatgtgtctgatcagcgaatacccaagactgcaaatcagtattaaacatatcggcaatatattcacgatttttaactacatctgcatctttgtcatgaacgtgcaatcctgtatttaacgattcaaaaggcttttggctgacaccgccgttttttgtcgtaaatccggcaatgacctctttgttgttttgattcgtttgagcccagtcttgtatcatgagtgtcgagggtgtggtaagactgaatgggtgatatgtattcatgatgatccaacctttcgacaaacattaaaaaagcggaatttcccacttattttaccacatcttactgcattcgttgagcgccgatttgcatatttctaaatgaaatgtgccggaagaatcgagacttccggcatttgccaatctgcggcagacaagcaggtttatgcatgtggttcacttaatcggactaagattacatcttccccgatttttactatatttcgccatggaatgaccaattcctcttcttttccaaaaaatccgagaactttcccatttcctccgagtatgatcgcctgaatttttccagtggtcacattgatatcaatatcaccaatactccccagcttttttccgtttgagacattgacgacatcctttacctgaaattctgaaatgctgatcattccatcacgtcctttttccgtccttttgttcaagtatatgaacgggcaggctgaaccttgtcagcaagaagaaattttcatgtcattgttcttttttccggctgcaccagctgatgataaaatcgagtataatttttgtatactctactagctgctcaatcgataccttctcgttcacagagtgtgcattgtgcagatctccaggaccgtatattacgcatggaataccggcatcatacagccatccgccatctgtaactgattgagaaacgtcaataattggacactcccgtttcactttctgatgagaggcagttagcactaagacgcctgggtggccagggtcaacttccaatgccggaaaaatttctcctctgtcttcaatcatagatgagcctccccacttgaatacagggcggttttccctaagccaaatatcactgtcactcagccgattgacgtaatcctctatttccgctgccacttggtcatgggtttcattcggataaaaatggactgtgatccacagccggcattcgtccgctataaaagccgcatgtctgccgccttctataactgccgggttaatcgtatttgtgcctggtttaaaaccgggataacttttcataatagaccagtggcgctcaagttcaccgagccccgcaatgatttttgccattttttcaattgcgcttgctccgaatgttcctccgcctgcgtgaatcatattccgtctcgttccatcatgaaatgtttgactgcttttgatttcgatccagcctgtaatgacacccccttggccttgaatatgcatatcgctcgtatccgcgacaattgcaaaatcagcgtggtagcccctcttgcagcattcaagtgtgccggcctctccaacttcctccccaataaccgattgcagaatcagatcacctggaagctcaatgccggcttcacgaattaatttgacagcaaacagcacacaagccattccgcccttcatatcggaagcgcctcgcccgattaagagaccgtttttttcaatgggatgaaacggatcgtgcttccattcttcatcctcttttacctctgccacatctacatgaccattgataatcaggctataataatctgctgaatctgttccctttagcttgccgacaacattgggatctccagggtacacatcccatttgtcgatcgagaatcccaattcatttaaaaatcccgcaatccatgactgaatgccctctgtatttcttgcaggcggagcgggtgtttgataagaaatcagtgttttagcaagctgaataagctcctccttttgttcttccacttttttttgcaaagagtctatttgttgatccaatgtaaatccgctcctattctttaaaatcaaaaaagccgtttcaaatgtgatgaaacggcttaataaaaacaaacgaagtccgatgtactccgcttttcaccgcttccctccgctggcatgatccagatcaggtcaaaagggttgagacaaagtctctctcagcttcgcaaagcacccctaggatgaatctatatatgtttgtcaggcattcgttatcggctcagctcttgttaaaaacggccgatcctgattccataatacatggattggcgtatcaaaaaaagcggaaagtacttgatcagtaagcatttcctttatttctccggatccaaagacctctccctgttttaataaaagggctttatcaaagacaggcagaatttcttcagcatgatgagtcacataaaggatagatggtgcattttctttgtttgcaatgtatgtaatcgtatctaacaacttttcccgggcaataaaatccagccctgtgactggttcatccagtatcagcaactccggatcggccattagtgctctagcaatcaacgctctttgtttttccccttgagaaagggtttcatagcggcgatcggcatattcaattgctcccaagtcctctaacaaaccaatcgctttttccctggtttccttacttggcgtttcatataacccaatcgaagcgtaagctccgctcaaagcaatttcaaaggctgaatctgccggatacaatttttgctgaagagctgctgagacgaggccaattttacgtctgagcttttccccaagctctgttttgccaaattcatggccaagcacctgcatctcgcctgatgttggaaaataatatgagcaaagcatatttaacagcgctgtcttcccggcgccatttaggccgtaaagcacccaattttccttttcttccaccttccaatgaatatctctcagtatccatttcccattccgttttagtgagacattgtcaagctgcaaaatcatcgtggtcctcctctttattgccttttataattgttttaattttcataaaactttgtacgaactaggataccttactttttccaaaacgtaaaccatccgtaatcaatagaaaagcctttaaaacaacatcgttttaaaggcttttcattattgatgaatatttttattcatttgtttgatagccgctttttcaagtctggacacctgcgcctgagaaattccgatttcctcggcgacttccatttgggttttcccttggaagaatcgctttctcaaaatcattttttccctatcattcagccttctcatgccctcttttaaagccagctcttcaatccattgtgaatctgtattacgctcatcactgatttggtccatcacatagatcgggtctccgccgtcgttatagatcggttcaaatagagaaaccggatcctggatggcatcaagcgcaaatacaatttcctcatgcggtacttcaagaacttttgcgatgtcttctgcagtcggctccttgcttgtctcactgattaaccgctctcttacctgaagcgccttgtaagcgatgtcccggagtgatcttgagacacggatcgggttattatcgcgtaaatacctgcggatctctccgataatcataggtacagcgtatgttgaaaacttaacattgtggcttaggtcaaaattatcaatggatttcattagtccgatgcagccgacttgaaataagtcatcaacatactcccctctgttattaaatcgttgaatgacacttaagacaagacgcaagttcccgtttacaagcttttctcttgctgaatcatcgccttcatcctgcagctgcctaaacagccttctcatctcttcattcttgagtactggtaatttggaggtatccaccccgcagatttcgactttatttctcgacacttttttccctccctacaggagctgctgtacaacgttaagtatctccttgggtgggaaaaatatgcactgcactcagaccgaaaaactgtcgaaatcaggaaatccctgtaaaatcaaggggttctaaccataaaattttttacaccattttgttgaactcttttctcaacctttttataattcttttctcaagccgcgaaatataagactgagaaatccccatcatatccgctacatccttttgggttttttcttcttcaccgacaagcccaaaccgcagctccatgatttgcttttctctctcattaagctgttcaagcgcttttttcaaaagctttttatcgacgttagcttctatgtctttagtgatgatgtcatcgtcagtgccgagcacatcagaaagcaaaagctcattgccgtcccaatcaatattaagcggttcatcaaaggaaacctctgaacggattttgttatttcttcttaaatacatcaggatttcattttctatacaccgggaggcataggtagcaagcttgattttcttttctggattgaatgtattcacagctttgattagaccgatggtaccgatgctgattaaatcctctatattaattcccgtattttcaaatttacgggcgatatatacgaccagacgcaaattgcgttcaattagaatggcgcgcgccgcctgatcgccgtttgggagcttcattaacaaaacctgctcctcatctttagataatggaggcggcagggcttcactcccgcctatgtaatagacttcatcacttttcagcccaagtttcatcagcagcttataccagaggtgcgtcaaccgtaatttcagttttttcatcttcctctcccttctaaatgtcacgccgtttgagtatgataagtaacggacatttgcgaacattatgaaacgtgtttgacagccttgcccgaaagcattttcggatgaataatcgcgtcaaactctccatctgccgacagctttgttgtgctgatgccgattaaacatttatctgcagaaatcatttcttcttttgtcataatcgttacgtgatccggtttaacgcataataaaaattgattttgctgaccaactcccctgtatggaatcaatctcattttatctaaaaagcgaaaggaatcatcgagctgttcgatggcttccaatgggtctgtgtttcgaatgatcatcgtttcggctgttccgaaaatcggctccagtttatcaatgtaaatgatcattaccggtgtttttgtaagaggatcgtacagctgattaccggaatcaatcaggcctctgacatgaagtgtttggctgcccaaatctgcctgcacgctgactcgttcctcatattgaatgttttttgtttcaatatcttcaattcttcttttagaaaaaaaccataatgctggaaagccaccaacaataaacaaccagctgatcgggtctccaaaccctgtttgattggtaatcatgacaccgttttgaacaatagaatttgactgcagcaaagaatgggctccgataattcctccccccattaaaaaagtggcaaaataaaaggaaaacaaattttgaaagaaaaaccgaaatcttttaaagccaaatgtcaccaccacaatcacaactgaaaaagctagcttcccagccggatgttcaacaatcggcgaaaaaggagtaaacatcaaaaggacaatactggaaccgatgaacgctccgcctaccagtcttcttttttttacatgccgttttaaaataaatgccgtgagcaaaagcaaaagtgcatcaaaacaaaagtttaacagccaaatgacatctaaatagattttcacatctgactcctttctttcttgcctcacgctgttccccttcttgcttcataagtataaagcaagctctgtgggaaagtctgtcaattaatgttgagaggaaaatacaatttttcagggaaatctgcttaatttgtcgaggaagtgtaatgagaggatatataaaaaagctgccaatgacggcagcttttttccacttaattttctgtgttgatattaagttttccattcgcagtttttctagtttcatttccataatcatctcgtacgatcacttctacttttgctccttttgctttaatagaagaagtggctgtccaatagccttcatatctccccggagagatttctcttaacgggagttcggtggcgttttgcacactcgctcttgcattcgtcagcggcatacgaatgataaacgttgcatccaaatcctcagcgcttgagaaagcgattttcacagattcaccgacttttaagtttttatcctctcccggaattaagccggaaatgacaggcttgtcaaagttcacatcaatgactgtctttttcgtcgttttgttgcctgccaagtctgtagcaatcaccttgatttcatttcttccattttccaaaagaatacgggctgagtatgaaccatcagctactgttgcttttttgccattcaccttgacgtctttcagattgtcatcggatacagcccctttgacagtcagcgtttctttatttgttttcccgccatcctttggattgtccagcgttaactcaggcttttcttgatcaagcgtgaccgtgattgggctggaggcatctgttgttccgttgtcagttgatgcagttgccgtcagctcattttcacccttgttgagtgtgatgcctgcatggaacgtgccatccgcagcggctttcgtttctcctgcctctttctctccattataaatgtgtaccgttgtaccaggagaagcttttccttttacagtgacgctatccttatttgtgtatgatttgtctgtcggtgaagtaatctcaggtacagcagcttcgtaatcaactaatgcgcgaatcatatagttgccgtctgctttgtcacccggctcccattgtccacctatatactgccagttgcggccggaattcttgccggtttcatccattgccagtccaggtgaatacgggtcaggtttcgactggatatatacgagataaaagtctttatcgaccataatcccttttgaactgagatctaccttagtccactcgccattgcgaagagcttcagcgttaaatggcccggcaattttcttgcccggtgctccgtcttttcctgtggcatcgtatacctcaaccttaaactctgtgccgcccggatctgggaactctgtatcccagaatctaaacagccctcctgtaagcatgcctttgtccttgccgtcagcgagcgtcatttttaccgcccatccgttaccggcagcaaaataggaattggcattctccgctgttccgtcatcatatgcaatttcacccggataaccgacgaaaggcttcaatgcagtttcttttgtaacatcaccttttaactcaacggaaaattcatcactgtaataacccggtgcagcgactttaatcgtataagcgccttcataggcctccagcgtatattcacctttgtcgtttgtcatagccggttccaccgcagcatcctctacaacataaacggaagcgcctgttaccggctctcctgtcgttttattgatgaccgtgccttttaatgtgcccttcttcatctcttctaacgtaaaattagcttgtgtcgtctgatccgtctttaaagatactttttgtgttttcgactgataaccatatgcttctgccataagcgtatagtctcccgctttgtgcttcagcgtgtactgccctgtggattgatctgaatatgttgattttcctgtttccactacactgacttgtgccctgagcggcaaaacttgaggctgtatagccttgttctgatgttttaccgctgtgtttgcagatggcttagcctttttcggatttactggctttttcttttgctttccagacggcttttcgacgcccagcttattctttttgactgtttttccggctgatttgtcagaaagcactacatcatcaatataccagccctcttttgcaatgctttcatcagattgaaggttaaacatcacttgaatgttttggcctttataagccgataaatcaatttcttcgtccgtccagcttgatgtctttccgttatagacaccagcctgctcccaattcttttcaccttccggaagaacaaaaacgtagccgtaatcaaaatcatcctctaaattgtgccagcttttaaattgaaggaacagacttcctgaatcaggtgctttaacaggaggcataacaaggttcatgtttgctgagttggcataatttcctgtcaaattcgttccatatactttttctccagatgctgctgtatttgggccagttgacggaactccccattcccagttattatttgttccgctcgcaacccagccgccgggtgcagtttcaaagtcctgcttatatcccgccgtgatgcttggtttcactgttacatcgtatacgtcagacgaaacgacatgaccgccaaaatcgtgaatcatccacttatagcttagtttagttccttttatatctgggatctctgcctgatacgttccttttagatgatcaccgctgattcgtttagccgttatttctgtccattcaccttgatcaagcttgtaggacagctttacagatgtcacactcacattgtcttcagctgtcaaagtcaatggcaggctgccaccttcataagcttcagttactttctcatgctgatagacaggaggctcttggtcatccccctctacagaaacttgtccttccgctttccctaaaccatctgtaacagcggatacagcatcaaaagcattcaccagaccatggccatatccgttattcggtgaatcaggaaatgttgaatccgtgagcggttcagccgtgctggttaatatatcctccatctcatcaacagaaagtgaggcattcgcctgttttagcagtgcagcaacagcggatacatgcggccctgccattgatgtgccgtcccatccatcctcatatgtctgaccgggaacggatgaacgaatatttacgcccggtgcagatatttccggctttgtttcatcatatggagatggcccttgaagagaaaagtcagcgagctttttattgatatcagtcgctccagttgcaaacgattctggatagtttgccggatttgcgatagaaccaggcccgccgggaataaagagatccgtattccccgctgaaaactctgggaaaatatcggccgcacgccaggcattgaccatgtctctgtaccattcatcaagtccagagccccctccccatgagttattgacaacatcaggagccatttccgggtggggatttccttccgcgtcctttggtgctaaaacccattcaccagcttccaaaatgtcagcatcagtgccgccatcttcagagaacgctttaacagcaatccattttgcgccaggcgctacaccgatttgatttgttccatcaggttcagagcccaccatcgtgcctgtcacatgggttccatgagccaaatcatcataagggcttgcctcgcctgctacggcatcataccagttcatttcattttcaggctcattaggattttccggattatacccgcgatatttctcttttaatgccggatgattccattccacaccggtatcaatggacgcaacaaccgtgccagttccatcatatccaagtgcccaagcttttggggcatcgatttggtctacattccattccacaccgtcagttgctttaatagctttctgtgcttttttcatattaaatggggaggatgacttaaaaagctgccgtttctcattaggaagcaccttctccacttcgggaaactgcgccactttttccataacctcttttgaggcatgaacagcaatcccgttcaccacataataagaatgaatttggtctgcatttcctttatctttctgggtgttcaagtattttaggacatcttgctgggattcatcggctgtgacttttaaagatgacacaacagcagaacgcttttgatattccgtcttagcggcagacagcttcttcgatttcgcttttttaacagccgcttttgccgctttttctgtgttagcctgatctttaaatttaatcagaaaagtcgttttttctttctttttaaagcttttctttaatgaactcgaaatcttgttttgaatggattccgcagattgaagctcctttttaacagaaggtgaggtgactttactgcttgccccggctgctcccggaaacagcagtgaactgatgacaactgtacttaaaacagagctgatgagtctgtttttcgtttttttcttcattttcatccccctttttcaacatgctttttaaaaaaagtgtcgtccctccttttaataatgaatggtttgtcagaacatcgctgtatattaactgtagacaatctgaattacagatattgtcgtttcatgtcattcaatttccaaatatatgaaaatgataaaaatgtcacaaaaataaatagatctaattatctgttttgttactaagcgaaggaagcaatagggaaaaagactttataagaaggaaagtgtgaagagaaaaacaaaaaaggacaaaatcgaaaacgattttgtcctttacattagccgcgtttattacggtttcttaagaatgtcgggatgtcaagcgtatcatcagccggctgtgaagtatgacggcttactgtgttctgctgctgaggctcctcacgttttggctcacgcttcggaacactttgattgtgtgttttgatgctttgatttaagcttggacgctgaggcttcgtcacgtccttctcttgttcgataaagccggttgcaatcactgtcaccacaatctcatcttttagattttcattaataacagaaccgaaaatcatgtttacgtcttgatcagacgccgaagcgacaatgtctgctgcttcctgaacctcatataggctgaggtttgttcctccagtgatgttcatgaggacgccttgcgcaccgtcaatggccgcttcaagaagcgggctggaaattgctttttttgctgcctctgccgcgcgattttccccagtagcaataccgatacccatcaaagcagatcctttgtttgacatgattgttttcacatcagcaaagtcaaggttgataagaccaggtgtagcaatcaagtcagaaataccttgaaccccttggcgaagtacgttatccgcttcacggaatgcttcaagcatcggtgtgtttttatcaacaatttcaaggatacggtcgttcgggatcacgatcagtgtatccaccgcttctttcattgccgagattccgcctgcagcctgaagctgtcttttgcgtccttcgaaggtaaacggtcttgtcacaacgccgacagttaatgcgcctaagtctttcgcgatttgtgcgataaccggtgcggcacctgttcctgttccgccgcccataccagctgtcacgaataccatgtcagcacctttaagtgcttcttcaatctgctctttgctttcttcagcggcttttttcccgacttccggattcgcacctgctcccaatcctctagtcagctttgcgccgatttgcattttcacttctgcttttgacaggttaagagcttgagcgtccgtgtttaccgcgatatactctactccttgcacttcattttcaatcattcggttaacggcgttgttaccgccgcctcctactccgattactttaattgatgctaagccgtctatgtttgtttcgaactccaacatgctaaatcctcctaatctgccgaatgactatctatctattcccaaaacatgcttaatagttttttcattttgctctgtttattatgttcggcttgtgttttttgttttccttttggccgctgctgcacctcattttggtgatgatgctgctcttgttcctcagatgatgagactgcgatttcctgtatcgcttcttcaggcatcttaaagcctatttttctgccttggattcttgcattccggcaggcgaattggatcaggcccactcccgtcatatattgaggatctcttacaccgatataattcgggcttgccactctgacattgttttgcagcacatcctgtgccaaagacatgacacccggcatagctgcttgtcctcctgtcagcacgaagcctcccggcagatcggtaattcccatactgcgaagctcttctgaaacaatttcaagaatttcttctactctcgcttcaatgatattcgctgcttcttgctgtgtaaatgtttgtttttgattggtgcctataacggttacctcaaaaatttcatcttccgaggcttcgtcatagtaggcatgtccaaattgctttttcacgcgttctgcttcttctgttgacgttctcaatccgatggagatatctttggtgatattttcgcctccgagaggaatgacacgggtagaagtgagatgtccgttctggaatacggcaatggttgttgaccctccccctatatcaatgagagccacaccaaggtttttctcgtcctttgataatgcagcagaaccggctgccagcggctgaaggcaaatatcagttatttcaataccagctctttcaacgcagcggagtaaattatgtaagattgtttttgaaccggtgatcaaggtgccctctacttctaaacgcacccccagcatttttttcgggtcggtgatttcatctcttccatctacgataaactgtttaggaataacatcgacaatcagctgttcgtgcggtactgaaacaacctgtgccgcctccatgacacggcgtacgtcttcaacctgaatttctttattttcactggaaactgctacaacaccgtttgtatcttgaatattgatataatttccattaacgccgacaatagcttttctaagcggaaaacctaccattctttcagcttggtcaaacgcttttcttatagaatgaacggtctcatctatatcaacgattgagccttttttcaacccttcagacggtacatttcccacaccgataatattaagggaatcatctgtcatttctccgacgatcacttttgtattggacgtaccgatgtcaagactgacgtaaagttcattgttgttcattctatggcacctcctcacatttcgatcatttctattctattatttgcggaacaacaatacaatgaatgtggctttacaagtgtgtaacaaaaaataacaacagaatatttttatgtgcttttcacattttatgtttattgaaaatattcgttatatcctatgtatatcctcttttatatcacattttttttattttttttagaaagagtccactttgttagtagatttcttctgataacggctatattctgaaataatctgactccaaatgcgaatatacctgctaaatacaagtctacaccaagatggactcccagaaaagctaaacttattgccaatataatattaaaaaagaaaccggaaacaaataccatttcatcatatgtaccttgtaaatgcgccctgattccgccgattaatgtatcaagtgcggcaagcaccgcaagcgataaatagtttgagtattcactcggtatcgttaagtttgtcattagtccaatcgctattccgagcaccagtcccaacacgggcagccacatgacaattctcctccttttcagtctttaagcagtttcagctgttgtacgtccagtggtctgtcatatgcttttaatgttagtttgctttcagatttaccggcttttaatgctaaattttcagatgcaaaaagatcctcaaggcctgaccccttcactctgctgtgtaacatgtccggatctttggcaagcacttttactgttaaaggataatcgtcaagggcgtatccgtctatttttgtagtgccgtttatatctctgatgactgtatgattcacaactcttcgctcgttaatcgagatatgctctgcaccgtatgagttgagttcattaatcagctttttcagcaaatccggaggcggattttcgaccggctctcctgttaagctttcagaaaaaagcggggaaatcgtaatgacaattccgctacctgttatatcggtcatgccggctgttttttttaaggattgcaaggtattatttagcgcggtttcttttgtcatttctttcgtttgcgaatagctattcagaagtttgtcatatttgtttatttcagacagcagcttttcctgcttcttctgctctgatgtcagctcttccctaatatcccacatatctcttgtatcccggactttggggtgctttaacgaattaaactgaacagatatcatcaggccgaagatgaccataagcacactgatgcttatgaaggaacgctttattttcaatctatttcacccgctttttcagtcattccttcgttttcagaatcggtttcatttgtacgtttttctctttttctgccgacacagaaatatgatccattgacagctgatcaattaggcctccagcgatatttaacgagggcagcaggacatctggatctccaatagcggataccgtaaatggagcgggatgctgcaccccgtctaccgttaccacaggaccattgcatttgatatacgaatcatgcgtcaaacgctgtccattaacggcgacagctgccgctcctgagatatacatttcgtttactacttggaagatatggctttcgtgaacgatgtaactattcacattctccccttccggtatgtatgacgcatcttccaatgtcacctcaacgccttctccctgcacaccgacttccccaatatacatcctgtatttttctgtatcttcgaggacattatagtattccgacttctctttcttcagcttattttccgcctggcggactttgttttgcttttgatataattctttttcaagcttcttattttctttctcttgtttcagaagttcatctctcagcgcatattcttttttccactcttccgtctcagccgcgcttttgttgttttcttttgtcatttgaaaagaaaatgaaatcaaaaaacctgcgataagcataatcaaggaaagaaggactgctgatttgcccctcaattttcatcttcctttttagcagctttatcgtttttcccaaactcttcaaaataggtggcaacttctaaatgaatgattccttttttattgctgcttagctgtgagatgatagaaggatacgtcttcattcggtctgcaaacgttttaatagatgccgtaacaacataaccgtcgttcatgtacaacttaatacggttttcatccatttttacaggcgtataataaatttctgaaatcgactgttttaacgactttgacaacgcatcgagctgcttggccatttgagaccgcttcttcgcgtttgtccaattcactaaaatcggtccggcatcatccggcgttacttcgtttggcagaactgagccgttttcaagcacttcatagtacacatcgtctttttctaaataagcaatcgctttatattcttcgattgcaatgttgattttattaggcagcgatttgctgatctccgcttttttcactaatttattttgctgaatcttcttttctgttttttgcttgtccaaactccaaaactcagtatctccgctgttaatatcggaaaggtcgataatttccttttttgatacattttcattccctgtaacagagattgttgatactttactgattggtgtttgcaggtacacaatgatcagcaccataataaaaaagagcataataaatgaaatgagacggcggtttgccttttgtttcctctgctctttaattttagggatccgctcttcaatgttaacgattttttctcggtcttgacccgggttcattgcctgttcacctcattcaaatgaaacagctgttaaaagtctgtctattccaaaacaaacggcatactatgatgccgtttgtcgtttgcttacagtatatcatatgaacagcttcagtcagaacttgaatcagcgatttccgccgatgatttcaacctctgtgtgcatatcaatctcgtatttttcacggattgtctttttcacatggtcaatgagatcaagcacatcttttgctgatgctcctcccgcattgacgatgaagtttccgtgcatctccgatatctttgcaccgccgatttgatatcctttcaagcctgctttttctacaaggttcccggcatgattcggaagcggatttctgaatatgcttcccgcacaagggcttgaatacggctgtgtattttttctatagtctttattgctttgcatttgctgaacgattgattccttatccttctgctccagctgcaaaacagcttcaaggcaaacgcccgggcgtttcttttgcagtacagatgtcctgtagctgaaatccatctgctcatttgtcagccactcaatcgttccgtcttcaaataaaatatgcgctttgacgagaatctcgctcatatcagaaccgtgagcgccggcattcatataaaccgctccgccgactgatcctggaatgccggcagcaaattccaaaccggacaggccttttttgctcaatgatgtagcaaggcggaccactgaataaccgcctccgactgttacttgttccccttcaagctccaaatggtcaagacccgcacccagcttgatcactacgcctctaattccttcatctaaaacaagaagatttgatccgcggccgatgactgtccacttcacatcatattttttaatcacgtccatgatgtctttaacagcatctacactgcttggaatgaccaatacatccgcaggtccgccgattttcatcgttgtatgattcgcgagcggttcatttgcaagaaccttgccgacttcgcgttcttttaattcctgtatcactttctccatcgtaaacctccgcattccatttgcttttctactatttttttaattcctcgagtacgctgtataaacgggcagccgcgtcaggaacaccgagtgactttgttcgttcgctcatttcctttaacgtttgctcattcagtacaattcggtctagcgcttcaatcagcttctccccgctgagctctgtttctttcagtacaatcgccgcatcatgctggccgagagatctcgcattgacctcctggtgattcgctgtcacatatggactcgggatcagaacacttgggattccgagagcagtaatttcggcaatcgttgtcgcaccggctctggccacaatgacatcaatggcctttaaatactcaggcatttgatgaagaaacggctttgtgaccatattatcagcggcacccttgcttttcagctcattcattactttttcatagtgaacttcaccggtgatatacagcacttgatagtctcttgttttcagcgcatcctgcatgtcaatgacagcgcggttaatcggtgcagcgcctcggcttccgccgaaaattaagaccgtttttttctcttcagaaagcccaaattcagccattgatcgtcccgtctttattgagacgacttcagaggctcgcgggtttcccgtaaatacaactttctcgctaggaaaatgtgatttcgcttcttcaaaacaaatcgctactttattaacatattttgaaagaaacttattcgtgatgcccggcaggctgttttgttcatggacaatagtcggaattcccattttcgcagcggcatagacaaccggcccgcatacataaccgcccgttccaattacggcatcgggcttaaattccgctaaatacgatttactctttttgacgcccttcagaaaacgcatcacagtcttgacattttcaaatgacaattttcttttaaatcctgtaatttcaattgaacgaaacggtatattctcccgctcaacaatttttttctccagcccgttttctgttccaatatataaaaattccacattaggatgacgtctttgcacttctttaataaaagcaagcgcaggataaatatgtccccctgtaccgcctccgcttattgcaattcgcatttcttttcccccagtctaagtttctctataacataacgataaccctgttttgttggacagggttatcgcatcaattgtttccaagcttcatgttagacaggaagcatggacatacattcgttaatacctcgagtagcggcttacattcagcagcacaccaactgccatcagcattagagtcaatgaagagcctccgtagctcagaaacgggagcgtgatgcctgttacaggaatcaggcccgtgactacgccgatattgatcatgacttgaatggcaatcattgaaataataccgactgcgacaaagcttccgtacagatcaggggcaccaagcgcaattctgattcctctccacagcaggacgctgaagaggagcaaaataagtgttcccccgataaagcccagctcctctgacaagatggcgaaaataaagtctgtttgcggctcaggcagataaaagaatttctgtctgctttgtccgagccccattccgaacaacccgccgggccccactgcataaagcgattgaatgatctgaaatccgcttccgagcgggtcttcccatggatttaagtatgaggtaatccgcttaatccgatatggagctgatagtacgagcccgacaaatccgctgaggccgatcagtccgagaaagacgaaatgggcgatccgcgcgccggctacaaaaatcatgacaatacaagttccgaccattactgtccccgttccgaggtcaggctggcacatgataatcaaaaatgctgaaaacacgatgccaagtgcagggacgaacccccgtctgaacgatgtgatgtttttttgtttttcagagagaaatttagcaaggaatgcaatcatcgcaagcttcataaactctgaaggctgtatgctgaatgctccgactccgatccagcttcttgaaccgttccgcaccattccgacgcccggtatcaaaacaagcaccagaaggaaaaagcagataaccatcagcaatttggaccatgtcctccaagtccaataatcgacattcatgataaaaaacatagcaatgacgccgattcccgcaaacaaaagctgccgtttcgcgaaaaagaatgagtcgtcaaatttataatccgcccataccgcactcgcactgtacaccataattaatccgattgttaataataataacgtaatgatgaccaataacaaatcaggcgatgtttttttagtagtcaaagcaatcgacaccccaagcttaaagtcattagggctgccgatttacttcaagacaagcccttacttaagcatatgcacggcatctataaacatgtcaccgcgttcttcaaatgttttgaattgatcccagctcgcacacgcgggtgacagcaggatgacatctccttcatttgagagcgcaaacgccgcagatactgcttgttcaacattatcgacacgtttgacatgttgtattcccagttcattgccgagtttctcgagttttggcgccgtctggccaaatgtaagcactgctttgacatgcttcatataaggtttcaagtcatcaaaaccatttccgcgatccagtccgcccgcaagcagaatgaccggcttatcaaaagctgaaagcgccttgcttgtcgccagaatgtttgttgctttactgtcgttataaaatttgcggccattcacagttgtgacatattggaggcggtgcttcacaccagtaaagcttgtcagcacctttttaaccgcctcattggatgctcctgccgttttcacaactgcaatagctgctaaaatgttctccaggttatgagcaccgggcagcacaacctcttccagaggaagaatggcttcgccgttaaacataatcatactgtcttttacatatgcgccctgttcaagcgttttgctgactgaaaatgggacgatttcggcttttccggcttcagcaagacgcacgacggtttcatcatcctggttgacaatggctttatctgaagcagtctgatgaaggtacactttctgtttcgctttttcatagttttcgcgcgtatggtgataatccagatgggcgtcaaatacatttaaaatcaggctgatttccggtctgaaagcgtgtgttcccatcagctgaaacgaagacagttcggtaacgatccattcatctccatcagcatgataggcaacctcacttgcgactgtgccgatgtttccggcaatcagtgctttttgcgagtcagctttgagcatttcgtaaattagcgttgtcgtggtcgttttaccgttcgatccggtaatcccgataaacttggcgctggtcaggtagtaagcgagctcaatttccgtccaaaccggaatacctcttttctccgcttcctgaaccataatattttcataaggaattcccgggtttttgatcagaatcgtgatttgatgctgatcgaacagagaaactggatgctctccgcaaacaacttcgattcctttttcagaaagcttttgtgccggttcattttcttcaaaaggcttttggtcattgactgcaacataaatgcctttttcatgaagaatggaggccgccgcatatccgcttttcgcaagcccaaggattaaaaaatgctgtttctgtaaaaattgatcattttccacttataaccacacctcgatgtaaattcctaaaacggcaagcaaaagtcccgcagcccaaaacgtcacgactactctccattcagaccagccgacaagctcataatggtgatgaagcggactcattttaaagattcgtttacctgtcgttttaaagctgatgacctgcaaaataacagataatgtctcgataacgaatacaccgccgatgataaccagcaggatctctaatttcgttaaaatggcaatggtaacgatggctcctcccaatgcaagcgatcccgtatctcccataaaaactttggccggatgagcattaaatacaaggaagcccagaactgcaccgacaacggcaactgagaaaatcgctacgtcatattgagactgattccatgccagaatggcaaaggcgccaaaggcaatcgccgcagtaccggataataacccgtcaaggccgtcagtcaggttaactgcgtttgatccgccgacaagcataaagagcacaaggataaagtaagcccagccaagatcaaatgataagtcagttccaggaatgcgaatatccgtcgcaaaattgtagtaatgatacacggcgtaaaatacaactgcaataataatttgtccgatcagcttttgctttgatgtcaatccaagattgcgcttcatgacaaccttgatgtaatcatctaaaaagccaagcaaaccgtagcctagcgtaacaaacagaagcagcaccatttcggggcttatttctgaaaacttctgtgtcataacaattgttgtcactatgatagaaagtatgatcatgaccccgcccattgtcggtgtccctgattttttctgatgtgatttcggtccttcttctctaatactctggccgaattttaatcttcttaaaaacggaataagaatcggagagagcagaacactaattaaaaaccccattaaaattgtaaacagaatgacttgctcaagcattgtccttttctcctcctgtttctttcaaacgacatacgtagttatcatattcatgatttttttccatatgaaaaatcttttcaagctccattattcagtaacatctctttcctatgaattcgtcttattcttattgagttcaacaatggctctcgccgctacttcagcatcatcaaaatcgaaagtttcatttccgatctgctgataggtttcatgtccttttccggcaatgaggacaacgtcgccttttttggcattggcaattgcgaaaaagatcgcctgctcgcggtttgcaatactgtgatagtatgcgttctctactccggcttccatatctcttaaaatcgcgcgaggatcttcgcttctcgggttatctgacgtgaaaatcggctcgtcagccagctccacagcaattttagccattttcgggcgcttcgtcttatctctgtctcctccgcagccgacaacgacaaatagctttccttccgtcatgtctctgcatgtctccagcacattttcaaggctgtccggtgtgtgcgcgtagtctacaatgacaggaaactcctgctgctgattgaccaattcaaaacggcctcttacaccatgcaattcttcaacagcctcagtgatgatttcaaacggtatgcctgctgcaatacatgtcgcaacagcggccagcacgttatacacattaaattgtccgacgagagacatcgtgatgtgcttcgtgcctttgtttgtcacgagatcaaagcttgtgccctgtgcagtgatactgatgttcttcgccatcacatcagcatcgtttttaattccgtatgtagagatatgcgcagctgttaccttttcaaaataagcgctcgcctcatcgtcagcattcaggacggcacgctttggatgttcatggttgaaagccccgccaagttgggaaaagagcaagctttttgcatgccggtactcatccatcgttttatgatagtccagatggtcctgtgttaaattcgtaaacacggcaatatcataatcacagccatggacgcgtcctaaagacaaagcgtgggaagaaacctccatgattgcagtgtcaacgtgcttgtcattcattttcttaaacgttttctgcagcgtgacgctttccggagtcgtgtttttaacaggaagtgtttcgtctccgattttcatgtacattgtaccgatcaagcctgtgcgttttcccgcttttttcagaatctcatcgaccatgtgggtcgttgatgttttgccgtttgtccctgttatcccaatcagctgaagcttcttcgtcggctgtccgtaaaacgcatcagacaaaacgctgagcgcgcgaagtgactgccggacaataataacaggaacattcacatcgacctctctttctgccacaatagccgctgcaccgttttctactgctttttgcgcaaaatcgtggccatccaccgtatacccttttacacatacaaaaagactccctttctttacttccctggagtccatctcaattgaagttatttcagggtcttgtgagtcgtttacagaaggttcggttgttaagtatgtaagcagctttgtaagtttcatcgtatcaaacctctcaacattctaattcattctttttatcattgaagtcacatcaaatgatgtggtaatgattttaagcatacagttcatattttagcgtaaataaaaggatacatccagctaatcttgaaagatatcagcattttttctgcaataaaagaataggcagcccgaatcaatcggctgcctccttttcatcttcttcagtcaaatacacgcgtatctttgagccttcttttactttcgttccggcagctggcgattgtttaacgattttgctccctttcccggaagcatccacattgagattcaccaatagtgactcaagatctgagacagacatccctacaacattcggaacttctattgtttttgtgtcgttccattggtattttttctcgatttgatttttccggggcttcacaccaagttccggcagactgtctctcataatatttccgacaataggcgctgccaccgttccgccaaactgaatcgtgcctttcgggttatccaccgcaacgtagacgactagactcggatcatcagctggcgcgaaaccgataaatgatacaatatggttgttttcaagatattttccatctttaaccttttgtgcagttcccgtttttcctccgacacgatatccttctacaaatgcattgcggccggttccttctgcgacgacgctttctagagcatagcggatttgtttggatgtttcctcagaaatgacttgtttctttgcgattggtgattgttttttgaccgttttcttcgtaacaggatcgatccattcctttgcaatataaggtgtatagagcgttcctccgtttacagcggcggatactgctgcaacctgctgaatcggcgtgacggatactccctgtccgaaagccgtagttgcttgctccaccgggcccactctctcaagcgggaataagatgcctgttccctcgccttggagatcaatccccgttttttgtccaaaaccaaagtctttgatatatttgaaaagcttttcctttcctaagcgctcgcctaattcaacaaaccccgggttgcaggagttctgcacaacttccagatacgtctgcagcccgtgcccgcctcttttccagcaccgcagtctcgctccgtccacttccgcatgccctttatcataaaattgatcccgtttcaaatttactttttgctcttcaagggctgctgcaagtgtaataattttaaaggtagatcccggttcatacgtgctccatactggcagatttcgattgtagacggacggatcaacagattggtaatcagcagggtcgaagtcaggcctgctagacatccccaaaatttctccgtttttcggattcatggctacggcaatcatgccgtccggatgatatttggcctcagcgttatcaagctctctttccattatcgtctggacctttgaatcaaccgtcagcttcatatcaagcccatccttaggcggcgtatagtcatccgcttcatcaggcatcttcttccccttggcatctgtataaaacttaacagaacctttttccccttttaaatcatcgtcgtaataggcttcaagtccaaggagcccttggttgtcaattcctgcaaatccaagcacatgagataaaaagctgccgaacgggtaatgacggatactgtcctccgcaacatacacaccttttaaatcaagcgctttgacttctttcgccttctcatttgaaatttttctcccttcaggagtgatcttttcgattgacgcttttttagtcacatgtttatatactttttcttctgacatattgagcaccgccgcaagctgcttgctcgttttcatcggattctgaacttggcgcggcacgacgaatacggtcggcgcacttttatttgttgcgagcttcacaccattccgatccagaatctcgcctctctccggctcaaacggcaagttccggctccaggaatctttcgctagcgaagtcagtttttcgcccatcacaaactgaacataccccagccttgtatcaatgatcagaaacacgatcacgccaaaaagcaaaacaaataataaacgttttctaaccgttacattcgagacgcgcaagagaccgttcactccttatttaggcttgtttcattttatgcctgaatttggacaggtagaacgatgctcctctgaaggcataaaaaaagaaagcctgcataacgacggctttctttttaatcaggatttttaaacttaaccttgattacggttttgtctttgatttctttgtctttcttaacactttggctgacagcgtagccttgtccgcttacttcaatatgaattcccgcgagctcgccgtactgcagaacctctcttctcgaccagcctgtcatatcaggcattttgattttgccgcccgttttcaggaagaccttttgattggtgagaacttcctcatccgctttcggatactgttcttttacagcgacatcactgccgatgacaattggtgtgagattctcctcttttgctttcttttgagcagcagctaccgtttgatctgttaaatcaggcattgtctgcgcttttgtttcttccttatctgagtcagatttttcagttggttcgatgtttaggtagtgcaggctatttttcattgttggattgaagatttctgatactggatctgaactgctttgtcctgcttttagttgcggctgctgtacagccacataaattaaaagctcaggatcatcttttggcgccatacccataaacgaaaagatatagttatctgtgccgtctaaatatccgcctttaccggctatttgcgcagtacctgttttcccggcaacatcaaaaccttcgattttatatgcttgccctgttccgattttcgacgtaacaacttctcccaatatatcccgcacctttttcgctgtgcttgcagaaattggggttccggctgattccggcttattttgataaatagttttatctttatcgggatcaacgatatggtcaatgacataaggtttcatcattttgccgtcatttgcaattgccgttgcggcctgaatctgctgaattggtgtgaccgcagacgcttggccatatgcagttgacgccttatcaaattcatatttaaagttgattttgctggagacttctcctggcaaatcaatacctgttttctggtaaaaattgaatttgtgcaaatattgattgaggcggtcatatcccagcttttctttcgccagtttcgcaaaagcgacattcgacgaccttaggacgccgtcatgatatgttgtcggaccccagcctacaccgttattgtgatccttaacaggtgctccgccaacttcaaatgtccctgatttatatttttcgttcgcattaaacacgttttcctgcatcgcagcagcaagtgtaaagatcttcatcgtggatccgggctcatacgcatatgaaatcaaatcattatagtagtttgtcacatcgcgcttgttcggatcaaagcttgggcgctgtcccatggcaagcactttgcccgttttcggatcgacgactgcggccatgatttttttcggattatacttttgcgccacttttgtcatgctgtcttccaaaaaggtttgaattttctggtcaatggttaaatatacattgtcaccattttttggcgctgtaattttatttttgctgttcgggagctcccagccggatttgtcgctttcatatgtcacatatccgtcgcgctccttcaaatacttatccagcactttttctaaccccatcgcgccggaaatttcatttgtgtcttgatcaacctcggcatagccgattaaattggatgcgaaaataccatttggatagtagcgttttgtatcccgcaaaaatgaaatgcccgggagtttcattttttcaattttttgcttttgtgaatacgtaatatcccggccagctgagccaaactcgacttgttttgcatctttatttaagatatcaaggatgtcggccttgtccaagtttatcactttagacaatgcttccgccgttttttctttgtttacaacatgctgaggatgcttgacatcagtggtcatttttttatcgagaatcgcaatcagtttatacgtcgctgtgtcctctgcaatgacttttccttttcggtctaaaatcgagccgcggctcgcttcgatggtccgtttcttttcatgctgctctgtcgcttttgtcgcaagcacttcgccgttcgcttttccggttatttgaatatatgccattctccccaggatgacaaagaaaaagagagcgaaacaaatacttagaatcgctgctcctctattcataaatttattcttttttggcatttgaatcattcctgtatgtttttcacttttttatcttttaaattcaagccgttctttttcgcaatgtccataatgcgctgcggtttgcttaaatcagcaacgcttttttcgaggtcaccaatttgcttattttcggatgaaatttgctcctcaagcttttgcacctcaatattggtttgatatgccgcatacgccttcgatacgatcaaaagcgatacgctgagcaccgccgcagcaaagaggacaagaagcactttttctccgagagtaatggaagcccttttcttgacaatcacttttttctcaggactgatcgcatgccgctgctgtttctctggttggtaagctaaattgctcataggctgatgacctccttttaattttgcgttcgcgtttcgttattttcttttttcagcaatccgaagcttggcagaacgagcccggttgttctcttcaagctcttcttgagatgccgtaatcggttttcgtgtgatgagcttcagctccggttcaaactcttccggtataacaggaagccccggaggaagttccggaagcgacgacttttctttaaaagtggttttgcaaattctgtcttctagcgagtggaaggtaatgaccgataccctgccccctggcttcagaacctcaattgcctgctccaaagcttcttcaaacaccctaagttcatcgtttacggcaattctgattgcctgaaacacgcgtttagcgggatgtccgccgctccttctcgctggagcgggaatcgcgtcttttattagatcgaccagttggcccgtagtttgaataggagacttcattcttgcctcctcaatttttctggcgatctgtttactgaacttctcttctccgtatttaaagaaaatacggacgagatcctcatagcgccactcattaacgacttctttcgccgaaagcgtagccgactggtccatcctcatgtccaacggtgcgtcatgatggtaactgaatccgcgctcaggtgtatccagctgcggagaggacacccctaaatcaaataaaataccgtctacttctgtaatgccttgttcattcaaacattcttttaaatacctgaaattgcttttaatcagaatgagctgtcctttataatcggacaacacttctttagcatgctgtaatgccgtatcatcttggtcaaaagcgattaaacgccccttctcggataactgctgcaataagtatgtactatgcccagctccgccgagtgtgcagtctacatatgtaccgtctggtttaatattaagtccgtctacggtttcacgaagaagtactgtcttgtgttgaaacatattgtgttggtcccaccttttataaggatgaattgaaattgtttttagagtgttatacacgaagaatcattatatatcaaacccaatcatgttttcagcaatttcagcaaatgaatcttcttgctcttctgtgtattgttcccaaattactttactccacaattcaattcgattagaaaccccgataacaacacattctttttccagtttggcgtaattcaatagagatgatgcgatatttaccctgccttgcttgtccagttcgcattcagtcgcccctgaaaagaagaaacgggtaaacgcgcgggcatctttctttgtgagaggcagagcttttagtttttcttcaatttgtttccattcgtgcatagggtagccgaagagacattggtcaagtcctctagtcagcacaaattgctcacctaggccttctctaaatttagcgggtacgatcatgcggcctttcgcatcgatggtatgctgatattcacccataaacatgatctcttgccccactttctctccttaactcaccactattcaccacttcgctccacaacttcattttacactgtttacccataaaaaaaaaccctgaactattcagggttctttaaaactttatttcaaagtttgacaacttgatgttgattttgaaaagaaaatggcagattcttgaatgtcgtgaagaattttggaccgtacctgttcaaataatacatgatattccaaatccgttcttgcggcgcaagaagcggcttaatgctattttgaattctttcataatccttcaagacgtagccttctttttcttcaattcgcttcgtcaccgtgtgctctaagaattgaagctgatcctgaataaaagcggcatttttcaggagtaaaggttccatgctttgatcaacctttaacgcctcctgccggaccgttttgtgaatcgcttcaatttggcttttcgcctgatccatcaccgccgtaaactcttccggaatctggcgctcgaagtatgtctctctttgattctccgttccgctctcaatcgcgtcttgtaacgagatattccgttcagccagttttttctcaatatgccgctcaagtatcgtaatgttcagccttggcatgacaggaggcattttgaaacccatcaccgcaaaagcctgtttgagctcgccccaatagttgatttctccaggccctgcaataaatgctaaagtcggaatgagaaattcctgcattaacggtctcgttacaacattgttgctgaaacgctctggatgttcttccatatgtgtatgaagttcatccatcgtccatcctagatcaagctctttgatgacaaatcggccgttatctttttcaattaaaaaacgctcttcttcgtattcataaaacagattcgcctgctcttttccggactcgataatcggtttgtagcctgcttgacgcatgaaggcctgctgatctgatacagcccgggcgagttcatcattttctcgaagaatcttttggaacatggccgtttccagctttttaatccccggatccccagaatttaataaaactaagccctcttcttggaacaaatccgcgatcagcagttcaaagaagtcagtaaacgtaacagattcccttaaacatcgtttcacattgtcgagaagtgtattcgtatggtctgtttcttcaaaagcggcaaaaacatcatctatccacgcggcacacttttcctgatcaagcgatgtactcgcggctgatgatttcttccaataagactgaggcagcttttttttcacaggcccattctcttcagatgtgtgaacaaaattaatctcatccaaatcgtggtcttctccagccacccagaagattggtatgacaggcacttgcagttccttttcttgttgctttgctaaaacaatgattgaaatgattttatgtatggtgtaaagcggtcctgttaaaagtcctgcctgctgtccgccgactacagcggcacttgacgggtccttcagcttctcaatagcagactgcatcgcacttgaaccgaatttattatggtaagaggttaagtacgccgccaattcctctcttgcgaaaaaccgggaagataagtcttccagtctttcgcgccacatgtccttatgatgaatactgtaatcaaaaaaagaagacatttcttctttgccatctatatagtgctgtacaaacacattctgatttttgatggaaagttcagttagctgcatcttctagaacttcctttctccaataaatagttagtgatccgaaatgagtatagcatgttaccgaaaaagctcaaaagactttgtttgtatttcgctccaatgctttgatgctgccatataaaaactctaggtggacggcatcaagaccttgaagacttgcttccttcaataagtatccgataatggcgtcagcttccgtctgccggcctccaatgacgtcaaccagcattgatgaacgattctctttcgtttgtccacaaacggcctgaacccgctcccaagccttttcttcgttttcaagttttaaaatgctgcatgcctcctgaaataccagcttcataaaagccagataagctggcgttgtcagcagttctccatttttcacctgcaataacgcagttaaaggattaatacacgcatttacaatcagcttgcccgtcagcagacggtaccaatccgtctcataataaatcggaaaatccgaatggttatgctgaaacatgatgttcagccggtctggttcagcatcgtcgaatgcgctccattttatcgcacctaggcctgtatgatcaacagctgtatccgattttcttacagctccgtgctcaacgattccaacataaatggaatggccaacgtgccagtcttttaggtcgtggatatgccccatgccgttttgcaaaaataatatattcgtcttcccgatccgttcaagcgacgaaaaaacagactgaagctgatgctgcttcactgttacgacaagcaggtcaaagtccgaattgatactcgtgtccgcactgcaatcagccctgaattcctccccgcctttataaagccggattccttcagaccgaatggccgcagcctgttcttgccgcctcgtcacaacagtcacgtcgtgataaagtgacaaataataggcgcataaaagaccgacggagcctccgccgataattccaattttcatgatgtcacacccaatttagcatttacgtattatcatagcagaagtaagaagaaattacttctcaaagatcccatgtgcttaaaattaaagtttaaatatttggattttttaaataaagcgtttacaatatatgtagaaacaacaaagggggagatttgtttgacaaaggtagaacgtctgcttatcaactataaaacgctggaagaattcaagaaattcaaagaatacggcattcaggagctttcaatgcttgaagaacttcaggataatattattgaaaatgacagcacctcgcctttttacgggatttattttggcgataaacttgtagcacgaatgagcctgtatcaagttaacggcaaatcgaatccctattttgacaaccgccaggattatttggagctgtggaagcttgaggttcttccgggctaccagaacaggggatacgggagagccttggttgaatttgcaaaatcattcaaaatgccgatccggacaaatccgagaatgaaatcagcggaattttggaacaaaatgaactttaaaactgttaagtatgatatggcgcgggacaaaggggaaaacccgctcatctggcatcctgatatggatcacgaaatgacaccgggagagtctgcatagaaataaaaacaaccggcctattcttactatagggccggttcatttcaggcgtttctttacgtttcttgagccgtttttttcattcttccgtcttccttcgaaacaaccatttttctggcccgatccatgatatcgatcagtgccttgtaatcctcttctgtcatctctagctgattccgcaatgtctgattttcactccgcaaatcctcaagctctttttgcagcgattggatttgctccttcaatttttccctttcaagctgaaattcttgtgcagacggtgcttctttgaattgttcgagaaattgaatgacatcctgaatggacaaatctcgttttccttctgacgatgctgaggcagtctgcttcatggaattcggcatattgaccgaatgaacgccgatttgctttctcagttctttcctttgcttttttgcaagctctatacctgactggtattgttttctcacatacgagttccacctgaaaccacaggctgccgcggttctggtcagcgccctcccaacctcctcaaaggctgaaagctgtgttcctccctctcgaatatgacgaagcaccacttctgccagcagcaaatcctcatcctgagtccaagcatcttgtcttgtaatggtcaaattcaatctccctccatgtcagcttatttatctcatacatatgccggtaatagattagatagactatttgaactcacaaattttccgcaagctgacaggaagagaaaaagaaaaagcgcagggctttcaccccgcgcttttcttattagttactttttacatttatgtctttgccgttgtatgatccgcatgctttgcatacacggtgagacaacttcatctctccgcatgacggacattctgtcataccaggtacattaagtttgaaatgtgtacggcgcaatcttttcttcattttagaagttcttctaaaaggtacagccattattcccacctccttaaagagttaagattcatcatcttgttttaagagcttttcaagggctgcaagtctcggatcaacttgattcttcttgtcttcttccgaaatgacttgccaatcctttccttcttgaggagcagctcctttttcttgttcagattcacaaaagatttgcatagggatttctaaaagaatttcttctttcacgatcggagttaagtcgatagtatcgtcctcaacaatatgaacgtcatcatcttctatatcatccgtgtgatgaaatataaacagttcttttgttgaaatttcaaatggatacgggacatcaacgagtgttcttgagcatggcaaaatcatttcgcctgaaattgtaaaatcaaacgaaacctgtttggatttgatatccgctctgcccttcacccggacgggagaaatgcggcgaatgtcagaattcagctttgtcagctcatttaactcaactgtttcatcaaactcaaaactttgttttggcatttgatgcagctgataaatcgtccatttcatttgtatcacctcaggaaagcaacaaacatgattatagcttttaagattgtttttgtcaatattttttctttacagcataatgctgccattgaagtatcgttgacagcggaatatgctatgcatacacttaaaacaaaaataaggcgtaagagttttcatttgcaaatgtaccatacgtttttaaacatagcaagaaaggcggaaaaaatatgaaagctgtcggattggtggttgaatataatccctttcataacggtcacctttatcatgcccaaacagcaaagcggcaaaccggatgtgacacggctgtcgcggtcatgagcgggcattttttacagcgtggggaaccggctgttgtgtcaaaatgggcccgaacaaaaatggcgctgcaaagcggagttgatcttgttattgagctgccttatctttatgccgtgcaaaaagcagacatttttgcacgcggcagtgtttccatcctgaacgaacttgaatgtaaggcgctgtttttcgggagtgaaaatggggatatcaagccgtttttagaaacagcacagcttattggtgagcataaacatacatttgatgaccgaattaaagaagaacttaaaacggggacgagttacccagcagcggcggctagcgccttcagctccattttgcataccgaaagtgcacttgacttgtcaaaaccaaataacattttggggtaccagtatgtgacttcggttctaaccgggggataccctatgaaaccttataccacggcacgcatctcttcggactatcatgatgccgatctccctgaaggcgaaaaccacattgcaagcgccacaagcatcagaaaagcgatgactggccagaatctcgaagcctgccttcgttttctccctgctgcatctgcacgtgaattagcagcttaccgcaaatctttcggattgtggcatacacctgagagctacttttcttacttaaaatacagcctttcaactgtaacggcacaggaattacagcaagtatacgaggtggaggaaggtttagagcacagaattcttcgttcgatcagaaaatccagctcctatcaggaatttatggagctgctgaaaacaaaacgctatacgtggacaaggctccagcggatgaatacacacattttaaccagaacaaaaaaacaggatatgcaaaagctgcttgacaacgataaggcgccgtatatcaggcttctcggcatgacaaaaaaaggacaggcttatttatccgaaaagaaaaaagcactgtctgttccgcttgtcagcaaactgtcctctttctcccatccagctctcgatctggacgtaaaagcaagcaggatttacagcctgccgatagaagagccgctgagaactgagtttgacctgcaggaatacggacatgcaccgattcgatatgatgaagatgaacaacactttttaaatgtatagaaaaagcacctgagaatcaggtgcttttcgctttcagcttattcaaataatcaatcgcatcctgcatggtatcaacaggcacaatcttcatatttgaatcaatatcttttgctgtttttactgcgttcttataatcggaattgctggcgccgttttgatttggcgcgaagaaaatgtcttttccggctttgtctgcggcgacgactttttgatcaatgccgccgatcgggcctactttcccatcaacatcaatggtacctgttcccgcaatatcgtagccttttgtttcgtctggttttgtcagctgattatagatttcaagggacatcattaaccctgctgacggaccgccaatattttcaatttcaaaatcaatatcaggctctaccttcacgtttctgtctgtataaagcgaaactccgattcctgcccgatccggctcatcaggaaattgttttaacgtaagggtgacacgcttttctttttcttctctttcgatctttaacgtgactttatctcccgcttttttgctgctgatataatcaattagcttttcagcagactgatagtttttgccgtctgcgctgatgattttatcaccgacttctattttcccttttgccggcatgttttctacaacagagcttgcgtatatgccgttaaaggaatagctgactttttttcctgccttttgataggcggctataaccgcattttcttgcgagcttttcatcatttggagctgtcttttcatatactccttatctgactcgccttcctccttaatgctctcatcaggaacaatttcataataagggtgcatctttgcccacacatatgtaaacggattagccggtcccactttaacagtcattaaggacaggcttcctttttccgggtagcctccctccacttttatcaatgaagcaagctctgtcgcttctcccggttttgtaatatagtatggaagttttataaatgataaaacggcgatcagtatgaggatgacgagcatccagctaaaatgttttttacgtagcaaattatgagccctcccaattctctatttcttttcttatcttgctgatcattcggtttgtcgcctcttcgcctgccgatatcatttcttcaatattggcaaacgagcttgagctgtaagtttcaagggaagggcgaatcatgatatctgcggcaattgtttgatgccgcactaattcattttgcagtatatccatactttgcataatcacatcaaaaatatgcactgctgtttcagtttttcgaaccctggaaacatccgaagcgatgataatatcagctcccatgtctttcacaacagaaaccggaattcgatcgacgaccgcgccgtctacaagaaggcgtccgtccagccgctgcggaataaagatacccgggatgctgatgctggccctcactgcatctgacactgatccttttcggaacacaatcttttctcccgtctgtagatcacacgcaacaatgcccagcgggatttggagctcttcaatcggttttccgaatgtataagcatgcacaagctgtctgacgcggtcaccttttaaaaaaccgagtttcggaaccgtataatcagcataaagccttcgtttaaaggctttggctacttttttcatcgttgccacgtcatgtccggcggcgtaaaaactgcccaccaaagcgcccatgctgcttcctgcaatcatatccacttcaatttggtgcttatgtaaactggaaagcacaccgagatgagcgagccctctggcccctcccgatcctaacgctaacccgattttaggtttggccaaagcgttaacctcctgcctgaattccctgtatatcgaattctatggtctaaactgaacccctatgctcgtatattagtacaaagaatcaagaggacaggtactgcttggccgttttacatcatacattattttatcatgatatacatgtcattgggcatttttagcatcggggaggtaagaatgaacttgtcgaagattaatacacttttgattgcctcgttttttctttttttaacagcgactgtcatctcacatccacaggcttcattcgaagcctctaaaaccgggctgtctatgtggtgggaggttgtgtttccgtcattgctgccattttttattctgtccgaactcttaatcggctttggcattgtgcggtttgtcggtgttttgcttgagccttttatgcggccgatctttcgcgtgccgggtgtcggcggcttcgttcttgctatgggaatggcatcaggaaacccagcgggcgcaaaactcactgcccgtctgcggcaggaaaatcagatttcaagagtagaggcagaacggctcgcgtcgtttaccaattcttcaaacccgctctttattttcggcgctgttgccgtcggtttctttcaaaacgcgtcactaggcattttattagcttctgcacactatttggggaatcttgccgtcggtttaacaatgcgttcctatggccgcaaggaagagcagcaactcagaagaaagaaaacgatacctttcccttcagtcaaagatgctttacacgctcttcataccgccagacttgcagaaaaacggcccttgggtaaaattttaggcgacgccgtgacgtcttctgttcaaacgcttcttatggtaggcggctttattattttattttctgtcttcaatcgactgttgtcagtggtccagctgactgatgttttgtctgttttcacaaaaggagcactgactttgtttcagcttccgactcaattggacattccgcttttatcagggatgtttgaaattacattaggcagcaagcttgtcagcgagacagatgtttctcttctgcaaaaagccattatcgtcagctttattctcgggtttagcggcttttccgtacaagctcaggtggcaggtattttatcggaaaccgacattcgatttaaaccattctttatcgcacgtttgctgcagggcgtttatgccgctgtcttcgtcatgcttttatggaaacctctttacacggcatggcatgatccatatcagtatgtatttaaatctcttaacagcagtgacatgccaactgcctttataaacggctggaatctgcttgtgcagatcggacctgctgtcacactatgcgcgctgtttacgtacattatcattttttcttacagactgacaaacggaacaaaaaaaggatgagtcaaaaccctcatccttgtctgaatttttgctgaagcgccagctctacttccggcggtacaaactctgataccgagccgttgtatctcgccacttcttttacgatgcttgaacttagaaacgaatattgattgtttgtcatcataaaaaatgtctcaatagattcatcaagcacacggtttactgatgtcccctgcatctcgtattcaaaatcagatacagctctcaagcctcttaaaatcgctttcgcattttttctttttgcataatcaattaacaggccttgcgatgtttcaactgttatgttcggaatgtcttttgtcacttctctcagaagctcacaccgttcttccacactgaacaaaggcttttttgaagaattattcagcacacatacatacacttgttcaaaaatatgcgccccgcgtttgatgatgtccagatgcccgtaggtcaccggatcaaaactgccgggacagacagctatactcgccacctcactaccccctctttttataaatcgccacacctgttaacccataggtttcttttcttgtcatcacaagatctcctacggtttcgggaagctcgacctctctgtcatgctcagcgacgataaagccgtcttcttccagcatttgatattcgtcaatcagcgttaaaagtgctttcagcttttgttccttatacggcggatcgagaaaaattccgcgaaagccggtttctcttttagcagcagcgtgcaaagctcgttccgcatcattgcggtatacctgtgcatgttttgtaagctccagcgttttcaaattagattttaccgtttgaatcgctttaaaatcacggtcaacgaatatacaatgctcaaacccgcgtgaaagcgcttcgattccaagtcctccgctccctgcgaataagtcaagtcccatgcccccgtcaaaataagggccgatcatattgaaaatggattccttcactttatcggttgtcggtcttgttgatgttccgggtacagcctttagtgaacggcctttttttgatccagaaattactctcatgttccacaccactttttctaaaagctattttgtttctttattcggccggacgccgctatgtacatagaaaaaaatcaatcctatcttaacataaagcattcttccaaacaatgaacgctaatctggataaacaggtgtataagcagaatcatccttgtccatactataagcaacagcatctagaggatgttgttgccaaccgcggagaagacttacgtttccccataagttcttcctccggtttctcctctccctttgccttctccttaacatattaaggaatagaaggaccccgcagatgcctgcggggatttttttatagctatatgccgattttataatcgtattcttttgccttatcaagctttgactcgaattccaattttaaaaacggtttataagaaggctccacttttttcacaaatgagtaagacgcaatcttgtccattgttttttcaatttggtccatatcacagtacagtacgacatattttaatcgttttgatacatagtgcacattcccgaacttcctcagcattttgctctgctttagggagtgcagatacacaaccatgccctggcgcctattctccaatacaatcacctgcctgttttctcttatatgtaaaagacgagacggccagtctcgtcaggacactttacatccgcagcttccgcctgaaccgcagccgcctccgcatgaagacaaaccgtcaaaataagggttcccagtcggaactttcacatgctccgaaacagctgtcccaatctcaacgctgacctcatcaagaatggactggagctcattttcagctctcttgaagtcagccaccttgtcgttcaggtccagctcacgtttgatctccctcattttccgggatatttctctatagtcaggatgatatttgccaaaacgctgtacatcctcatactgctcttttattttgataaaagaacgaataatccgacctgcctcttcatcttcctggagacgcttgtaacaattgcggtagttctcagccgtctccgactgcagaatcatctcggcaagctgctgagcttcactttgaagccgcacggattccatcgtcgcatacataacatgcacctccagttgttagtttaccatgaaaccagccaattggaaaatgcttaaccgcagccgccaacaaaaccttatgaccgcatgaaaaaagaccctttttcagggtcttttaatcttttgtccgcatcgcttgaaacatttgcatcatcatttgcgccatttgaatcccgttcgtaaactggttcacccgatgcggaatggttttttcataaaaattcatcatttcaagctgaaaggaggacagatcatccggttttcttgaaagtctgcggtaccatatcggctgttctctgatgaatcgtttccgttcttcgtttgctaaaatatattcctgaacctctttgcgcatatgagctccccttttttaatcctttcgaaaagaaaaaggatgctgtccagaacctggctgagaatgcttctgtccgcttccggaaaatgtattaagaaggctttgcaacgatgagatcgactggctcattttattgatttgttcgttcatttgattgacatccatctttttcaccgctgtcaccattttcgagacaaaatcatttttttgcggtgtttcaggcacagcttcagaagcttcttccggttcccgatacggatcccaaatcggatcgctctccccgaagaggacccaattttcatatacgtcctgccagctactttgttctttgcgcacttcttttatcagcttgggatgctttttgacgaattgtttaaagtcattgattgaatgattggcatgttgattcgccacaatcctcaccccctccgaaaatcgttacctactacaatgtatcgttttgtcgggcattgtgttcgcctatattcattcccaaatgaatttttaccgatatccctatacactggtgaaaaagcctgactgaagggatgggaaacggccttatctgtaagctatcagcacattcattcagaccagcttgtatggaaatagaaaaagccgggaccattcgtccgcggctttcattaccatcgtttaataaaattttgggtgtaatattttcggtctactcctactccaagatgcgtataatctgaattcagaagcgcttttcgatggccttcgctattcagccagccttctacagcggccggtccgtccacataattgtatgcgatattttcacccgcttgctgaaagtcaacatgcccttcttctaagcggtctttcagcgagccgtattttttagagacatgggagaaataattattttccttcatatcctcactatgtccaaacgccacctccgccgttggctgatcccattcaagcttcgcaagtccatgtttaacgcgtatgacattcgtcaaatcaaggatttgcttttcgctcgttgtttggatctttttccatttctcatctgaaacggctttcggtttaattaattccccgcggtacactacctcataaggtctttgctttacaaaggtttgcgcatcaaacgccctaatgctggatagcttcccctcaaatttgtccatatacagctggacatacatctttcctacctttacagtcggtcttgtattgatatcttcttcagaaaattcaaaccgataggaatttcctttatactctacattcacaaatggtgccacctgggtggtcttaaatacttcgccagttgattctccaattttgaaaggcttggcgttaatatcattacccgacgcgaataatgtgaccactttattgtttaataccccgatttggatatattgatccttaccttgattgtatacccaccaatcgtaatcataagccgaagggtcaatacgttcaggttccccaagctttttcgttacttcatcggcgggcttgcccatgaaggacaataaccctgaagtcggcatatgtattcgtttgccgctttgcgcttcctcattcgacacctgaggctcgctgtcatttgatttcttttcaggaacagatccatattgaataaacagaacataagttccgcagataatcaaaaggataaccattgctctcaatatatttttcaatctatcacccccgtggcgattcacaatctcttgtttacatcccattacaatacagcctatttaacatgtcaaagatttatgtgttaatgaaaaaagccttcttctctattatcaccttcggaaatatccgataaggcgctgccggcacgttcattcgtttgctcagataaagaaatatcaccaagcgtgacaattccagtcagttttttattttttgtaactggtatccttctgagctgatgcgatgccatcaaatgaagaacctcatcgactgaagcatcttcctccacactgacaggtttttcagtcatcgcgtcagtgattttttgcgagttcggttttttgatggcgattcctcttaatacgagatcgcggtcggttacgatgccgaccaatgtttccccgtcctcatcaactaccggaatcgctcctacatttgcgtccttcatctttactgcagcttcatatacattatctaataccgtgcaatattgcaagtcggctgtcatcagatcttttatttttgtcatccgtttaacctcctttagtctagtgctattgtcgtcaaaatttaatttttgcatactttcaaaagaagaagattcattgaaagtttaacgctttcatactatgattgtcaggaaaggtaatttttataaggaggggtcagtgttgaagtttactgaaagcggacttgaaggggttaaggctgagctcagctggctagacgacttaatggaaagcaaaggtcttatcagagcgggtcaatgggattacgagagagtcacctatgacaagaagttttcgacgattgagggtacgttttacctgcggatacaaggtattgcggcagaaggcgatgtcggaagcgggcgcgccgtgattcaattaatgtcccctctcctaggaaagcattattaccctcatggagtagaatatggagaaacggaagagtttcccgtacaggttgtgacaaaaagcaaggcactgattcaggacatagccaacatgttaaaaacagttcaaatgtaacgaaaaggtacagcatatttcgctgtaccttttatgatatcgtctgctgaatatacggcggctcctcctgcccgtccttttccctttctttcttcacccattggaaaaaaataatggccaaaaaagtaccgtacacaatttcctgaatgattttcatcatgactgctccgagctgctgatcctctaacaaaggcagtgtattcaacatctctggccctgttaatgggacctgccccatcatatccgctggcacacaaagcctcattgcctcagcccataaagccggatctgtataggtggcgtataacggtgcaccgctgaacatgatcaaggcgcaagcaggtgtgagcagcataccgtccgccataatataacccagcttcatcaagccgctgagctgccgtagacgctcaaccttatgaacaagcggccaccacatgaagaacgcaagcacaaagataagccaagtgattaatgtatggtaaaacggatccgttttgacagtatcaaatataagcggtacatgatataaagaaaaaatgccgttaaacaaaagcaaagcaattaaaggcgtcgtaaaaaaggaaaaaaacggtttgattgaaggcctgaaaatgattttttcccagagccatgcaggaattcccgcgattaacagaggcgggacaaccaaatacaggacggccatctgcaccatatgtgcgctgaacataatatgtccgagcagatcaaccgggcttccctcggctgcatataaaaacagcatcgccgacagaaagcataccatctctttaccagttattcgatttggctttgaagacattcgcctgtaaaaatagagataaagcgccgtaatgcctaacaggatacaaaaaagataagggctccacatcgcgcgaaacccgaatatctccaactgattcatttcttcacctccggcggctgtttcaaattaccaccatataattgtcacaaacgcaagcacagtgataaacgcgacaaacacccctgaatacaaaaacagtgccggcgcctcatgccctttctgattcatatgcatgaaataatacagctgaaagatgacttgaattgcagctagcaaaataatgaaaggaatcgtaaaccagctgccgacaccgtccgtggccacagtcagaaatgcaacaatcgtaagaccgatcattaaaccaaaagacaggacttgatatttcatctctcgggcatgcttttttttcttaaattcaaggtcgctattgatatgccctctgctttttttatcgaccatgtttatcccaccatccccattaaatatacaacggtaaagatgaagacccacacgacatcaataaagtgccaataaaggctggcaacgtaaaacttaggcgccgtatacagattcagccctctcttggcattgcggatcataagcgtgctgatccacataagcccaaatgccacgtgggcgccgtgtgtaccgacaagcgtgtaaaacgcagaaccaagggcagagcttgtgatggtaaagccaaattcatgggtgtaatgcttgaactcatagatttccagtcctaaaaagcccgcccccaataaaatcgtaattcccagccaaagctgcatcttgccgaaggaaaagttcttcatgtggtacatcgcgtacacactcgttaaactgctcgttaatagaagcattgtggcaatgaatacaagtgtcacatcgaacatttccgtcgtaggcggatcaccggcatttgaattccggagcgcaagaaacgtggcgaagagagacgcaaacagaacagtctctccgccaagaaaaagccaaaagcctaaaaatttatttttcccttccagggttactttttcaggagaagctggaaaggtttctgcggtgaatttttcttgaacttgcattatgccttcacccctttatcatcgttcggcagttcctctttatgaatatgatagccgtgatcatcaattactgaacgaagcagcatcgtaataaatgtgatgccgagcccgataaagatcaccggcagaccccaagcgtaatcacttctgtacagcagcccgaacgctgcgacaaaaaggccgaaggaaatgatgagcggcaggattgagccgtttggcatatgaatatcatcaaccggttccgccggcgtcattgatttgtgccctgcctgcttctcaatccaaaacggatcaagtcctctgacaaaaggaagctgtttaaagttatactccggcggcggtgaagaaacggtccattccagcgtacgtccgtcatgccatggatcagcacctacatattcaccttttatcgatgtccatatgacattgaccagcagaagaataacagctgccgccataaaaaacgccccgattgtactgatcaagttgccggtttccagaccctgtcctggcaaaaacgtataaacccggcgcggcatccccattaagccgacaaaatgctgaatgaaaaacgtgaggtgaaagccgataaaaaacaatacaaatgaaattttccccatcgtttcatgcagaattttaccgaacattttcggccaccagaaatgaacaccggctaaaaggccgaatacaacaccgccaataatgacgtagtggaagtgcgcaaccacaaaatacgtatcatggaactgataatcagctgctgctgctgccagcatgactcccgtcacaccgccgagcacaaaggatggaataaatgagacagcatacagcatagcggttgtatacttcacatttcctccccaaatcgtcaacagccagttaaaaatcttaatcccggtcggaatcgcgatagccattgttgcaaccgcaaaaatcgcatttgcaatcgggccgagaccagtcgtgaacatgtggtgcacccaaaccataaagcccagaaagccaatgagcacgattgcaaaaaccattgaagaatagccaaacaaacgctttctggcgaacacagggatgacctcagaaaaaataccgaatgcaggcaaaattaggatataaacctccgggtggccgaagatccaaaataaatgttcccaaatgaccgtatttccgccaagctccggattaaagaaattggttccgaacagccgatccagcatcatgagagccaatccaaccgtaagcggcggaaacgcgaacaaaatcaatgccgaggccacaaatgtcgtccatgtaaacaaaggcagcctcatatacgtcatgcccggagccctcatgttgataatcgtggccaaaaagttaatcccggctatcagcgtcccgagccccgatatttggagtccgaggacgaaaaagtctatgccgtgccctttagaatgaagcgaaagtgaggcatatgacgtccagcccgcatctggcgctccgcccaaaaaccagcttagatttaagaaaatgcccccgaaaaagaagagccaaaaaccaagcgcgtttaaaaatggaaacgaaacgtcccgagccccgatctgcaaaggcacaaccgcattcatcaaggcaaataagagcggcatcgcagccagaaagatcatcgtcgttccgtgcatagtcattacttcattgtacgcttgagcactgagaaacgcattttccggctttgcaagctgaattctgataaacatcgcttcaattcccccgacaagaaagaagaatccccctgctactaaataaagaatcgcgatttttttatggtccaccgtcgtcaaataatcccaaagcatagatccgcgcgtccgcttttctgtaagcgcattcaacatatgtgacctcccccaatatctccctttcttccctacttgctttccgcttttaagccttttaagtattcataaagcgcatctgtttcgctgtctgagagctttggatatgtgcctgtcattttgttccccggctttatgctgtcagggtccttcagccaagccttcacattttctttgttggcctctttcacccctgccacttttgtcctttcaccgaaggtcgccaagttaggtgccgttctagcggcttctgcacgcttatcattcggctctaccgcatggcagctcaggcagtttttctctttaaacagttcttcaccctgcttagccaaatcgctctctgctgtagacttatagttcttcatttcttttgtccagccctgaaattcttttgcagacatcgtcttcaccttaaaatccatcagcgcatgtgaagggccgcaaagctctgcacacttcccaaaaaacatatctcctgcctctttgcttcgttttgaatcaaatgtcaggaagaacttattttcattatccgtattcgtatcaagttttcctccaactgaaggaatccagaaggaatgttttacatcagaggcttttaaattaaaatatacacgctgatctgtcggtacaatcagctcctggcttgtgataatgccgtaatcagggtactcaaactcccaccagtataaatttgccctaacattgactacaagagcatcctcagctttgcggccttttttatccattggtgatgtgtccgctagctccagcgtatataatacaacaggaatcacaagaataatgagcagcaaaatcgggatcacggtccatgtgatttctaaaaatttattcccctctacctgtttcggtatcgtgttctcaccgacccgtgatcttctgaatctcacaatcacataaaagaagataacagatactactgcaacaacaaccaccataatcaatgtgctgagcactgtcaggtcatactgtttatcagccacctcgccagcaggcttgagcgtggataaaaaaggttttccacatccgcttaatagaagcggcactaaggctaataataaaataagacgccaatgctttaccatttcacccaaccccttttctggtcaatacaaaggcggaaagcggatcgaaatctatcgccatccaacctatcaccaataaagcacttacatttcctcttctcttaaattatgagtttttttactcaaaatgccatctatgtataaaagtaaagccgcctgattaaacaagaggtcaaggcggcatttactagttgtcatcgtttattttgaagcgataaaacaagcatcatatctattttttagaaaagcgtcaagacaaccatggcaacgaaatagattgtcatgtagttaagcgagtaaacgaacatctgcgttgcccacttcatgatattcttggagcggaatcccattaagccaagaatcagccagccgatatttaacagcaagccgagaatgacaatcggaagacccaggctaccaaggaaaaacggaagcggcatcaggcatgcaacccacacaataatttgtctttttgtcacttcaaatccgtatacgacaggaagcatcggaatatttgcagctctgtaatcctcagttttcttaatagccaatgctaagaagtgaggaatctgccaaataaataaaatcatgaataacacccatgctacgacaccgatattcccttccactgccgtccatccaataagcggcggcactgcaccggaaacgcttcctactactgtgttaatcgtatagcggcgtttcgtccacattgtgtacaatacaacatacgtaaagactccgataaaaccgataacagcagccatgacagttgtcatcagcagcatgatcaatcctaaagcaaccagcaaaattccagaccataacgcctgactcggctgaattttacccgtaaccgtcggtcttactttcgtacgctccataagatggtcaatgtcccggtcataccagttattgatcgcgcaggagcccgcaataatcagtgaagacccgattaacgtaagaagaacggtgtttatattgcctaaaaaacttaaaccggatatatgcagtgcaagccacattccagtgaaagtcgtgatgaggttagaattgacgatccctattttaataagggacagaaaatctttccatgccgttgtttcttcaatttgtccgtctatagctgtatcatttaagattctggagttagccataacgtaaacctcccttacaaacctaacgcaggagaataaaataacctgcaactctatcatacaagataacatcttgtaaaaaaacatcctattaaatattaaacgacaaacaggaatttatttgtgaactttttatgaattttaccaaagatgaaggcaatctccaaatcggcattgcgtttaccttatttctatcagacccggcatgaataatcaagtgtacattttccagaagccgtcattctattatatttttgtgaacaaaaggctctgggaattgccacaaaacacatattcgcttacacttggaacgtatataaaattgcagcagtatgttgagaaggtgaatattgtatgaataaagcattaaaagctctcggtgttctgacgacatttgtcatgctaattgttttaatcgggggtgccctcgttacaaaaacaggttccggccaaggatgcggcagacagtggccgctgtgtcacggccgttttttccctgaactgaatccggcttcaattattgaatggagccaccgattcgcaagcggaatctctattatccttgtgctaagccttgcgttttggtcatggagaaaaatcacgccgattttccgtgaaacaacgtttctcgcgatcatgtcaattatctttttatttcttcaggcattgcttggcgcattggctgtcgtattcggttcgaacgcgctgattatggcgcttcacttcggcatctcattaatttcttttgcttcagtgcttattttgacattgctcatatttgaagctgataaatcagtcagaacactggttaagccgcttcaaatcggcaaaaagatgcaatttcacatgataggaattttaatatattcctatatcgttgtgtatacaggcgcatatgtaagacacactgaatcaagtctggcatgtcctgatgtgccgctgtgcagcccgctgaacaatggacttccgacccaattccatgaatgggtgcaaatgggccacagagcagcagccttactgttatttgtatggattattgttgccgctgttcatgctattatctcctataaagatcaaaaacagatcttttggggatggatctcatgtcttattttcattacattacaggcactgtccgggattatgatcgtatactctgaactggctctgggctttgcacttgcccactcgttctttattgcctgtctgtttggcgttctatgctacttcttattattgattgctcgtttccgttacgaatccaggcaatcataaggactcaagaccaaagccttaggcggctttggtcttttttcatgtcttgttttggcgctttattgtttcaatggccagccttcgctgaacttgatgatcagtgagcggctcacttcggcctgtcccctttctcatcgtgattatagaaatttcatatgcatctatagtccgcgaacataagtattaaagccttttggccattggaaaatcagatagtgcttaaagaaatatgcatggactactacaaagcatctaaaaaattggtggtatataagcctctttttattttgggcttgtgacagtactctataatctctgaagtccccttatatctcttctaaccatctgtttcactccacattttctatataaaaaacaagagtgtatatcaaatgatatacactctttgttttttatgctttttcaatttcaaggagcagatctcccgtttggatcggctcaccatttttcacatgaacctgcttgattgttcctgagaaaggcgcctgaaccgttgtttccattttcatcgcttcattaatcatcaaatgatcacctttattgacttttgtgcctgcttcagccaataccttaataactgttccaggcatggaagctgcgatgtggcttggatttgtccggtctgctttcagcctttcctgaacggaagacttaatgctttcatctttaatgactacttcacgcggctgcccgttgagttcgaaataaacgacgcgggtggcatcaggctgaggctcaccgattgaaatcagcttaacgatcagcgttttgccgcgctcaatttcaacttctatctcttcacctaatgtcataccgtagaagaatgtcggtgtatctaataccgagatgtctccatagctttctgtcgttttcacataatcagtgaagactttaggataaagggcatatgccacagcatcctgatctgaaatttccaagttatgctgctctttaaattcctgtttgatcgcttcaaatgacaccggctcaagcagttcgcccggtctgactgtaatcggctcctgcccttttaagatcagcttttgcagtttttctgggaatccgccatgaggctggccgatatttcctttaaaaagctccacgacagaatcagggaaatctaaagattcacctttttcgtaaacgtctttttcagtcagattgttttgcaccatgtagagtgccatatctccgactacttttgaggaaggcgttaccttgacgatgtcaccgaacatatcgttcacgcgtctgtacatttccttgacttcgttccagcggtcgccaaggcctactcccttggcttgctgctgcaggttgctgtattggccccctggcatttcgtgttcataaatttcagtatgcggagacttcattccgctttcaaattcactataatatttacgcaccgactcccaatattgggacagcaattcaacgccttggacattcatttccggacggcggtcgttgccttccatcgcatgataaaatccgctcgcgctaggctgtgacgttaatcccgccattgagctgaccgccacgtctatgatatcaacgccggcttcaacagctttcgcatacatataaataccgtttccgctcgtatcatgcgtatgaaggtgaaccggaatgtcgatcgtttctttcaacgcagaaacgagctcatatgcagcctgcggttttaacagccctgccatatctttaatcccgagaatatgggctccggccgcctcaagctccttcgccatcgatgtataatatgcaaggtcgtacttcgtccggttcttgtcaaggatatctcccgtataacaaatcgcagcttctgccactttgccggtatccctaacagcatcaatggctaacgtcatcccttttacccagtttaagctgtcgaaaatacgaaacacatcaataccggattgagctgattgcttcacaaattctttaatcacattgtccggataattcgtatagccgaccgcatttgatgagcgtagcagcatctggaataaggtattcggcacttctttgcgaagatcttccaaacgcttccacggatcttctttcaggaatcggtaggctacatcgaaggtcgcgcctccccacatttccatactgaatagttcaggccataacgcagccgtcggatttgcgatttttttcaaatcatgcgatctgattctagttgccaataacgattggtgggcatccctgaatgtcgtatcagttaaaaggacagatttctgctccttaacccaatttgcaagcccttctgcgcctttttcatcgagaatttgctttgttcctttggcaggctgctgatcaacgtctacttttacgcttaacggtttgtcaaacgccggtttttcttttttcccgattccggggaaaccgtttactgtcacattgccgatgtaagtgagcattttcgttccgcggtctttttgtttagggaaattaaataattcaggcgttgtatcaatgaaagatgtatcatattgccctgtcaggaacttctcatgttttgcaacgttctcaaggaatggaatgttcgtttttatgcctctgattctaaactcctgaaggtttcgcaccattttggcagctgcctgttcaaacgttaaagcccaagttgaaagcttaacgagaagtgaatcatagtaaggtgtgatcacggcgccctggaagctgtttccggtatcaagacggacaccaaaaccgccgcctgagcggtaagccatgatttttcctgtatcaggcatgaaatcattttgcggatcctcagtcgtaacccgtgactgaatggcatagccgattgtaaaaatgtccttttgctcaggaatatttacttttttgctgtgaaggctgtgcccttgggcaacaaggatctgagtttgaacaatatcgacaccagtaatcatttctgttatcgtgtgttcaacttgtacgcgagggtttacttcaataaagtagaactcgttgtttgcaacaaggaattcgaccgtccccgcatttatatagtttacatttttggcaagcgcaactgccgcctcacaaatttggtcccttaattcaggtgacagcgagacactcggcgccacttcaatgactttttgatggcgtctttgaacggagcaatccctctcaaaaagatggacgacatttccctgcttgtctccaatgacctgaacctcaatatgtttcggattctcaattaatttttctacataaacttcatcattgccaaaggctgctttcgcctctgatttagcacgctcatatgcttctttaacttcactttcagatctgacaatccgcataccacggccgccgccgccaagcgaggctttaatgatgatcggataaccgttagcttgtccaaattgttcgacggcttcaagcgtttcggcaggaccgtcgcttcccggaatcacggggattcccgctttttctgcctgctcacgcgcttttaccttgtcaccaaacatatcgagatgctcggattttggaccaatgaatacgatgccttcttcttcacatcgtctcgcaaaatgaatattttcagataagaaaccgtatcccggatgaattgcatcgactttgtttcttttcgcaatatcaatgataccttcaatatccaggtaagcatcaatcggttttttcccttcaccgaccaagtatgcttcatccgctttgtaccgatggtaggaaccggaatcttcttttgaatagaccgcaactgttcgaatattcaactcggtacacgcccggaatattcggattgcaatttctcccctgtttgctactaatactttttgtatcgattgctgagacaaacttttctcccccttacccgaatggaatataatctatcatagcggaatatccttcccctgtacacacttgttttttacagataaacagtttttttgagctgtttctttttcattcccttcggcgccaagggctctttctttttcttattctctgaatatttcacaaacatgctgatattcgctaatatccccatactccccagcagcagcaccaaagaagagcccccgtaactgataaatggcagcgtaacccctgtaatcggaattaatccgctgacaccgccaaggttaataaacgactggatggcaatcatgcttgaaatgccgatcgccagaagacttccaaacgggtcctcacattttctggcaatataaaaaccttttatgacgacaaaacccaataagaaaatcacaaacaataccccaaaaatgccgagctcttcagcaatgacagccataataaagtcagtgtgtgattcaggcagatatccgtatttttggatactttcaccgagccccaggccgaaaatgccgcctgagctgatcgcataataagaattgatcacttgcaaacctgatgaatttgcatacttaaatgggtcttcaagactctcaaaacgcgccaaacggcctttagttaaaatttgatcctgatttaaatagagaatcgggctgactaaaatgaaaacaattccgccgagcaaaagcagcctcaccagcgtctttccgctgaatccggagcacaagatcatgcacgtcgcaattaaccctataatcatggctgtaccgaaatctggctgcatggcaattaacccgcaaattataagcgtcatgactaccggaggggctactcccgttaacagatggtcgatataactttgtttttttgcatatacggctgcaaggtataaaatcacgaccagtttcacaaactccccaggctgaatactcattccgccgattttaaaccagctctgcgcgtttccggcaacatgcccgaaaacaaacagtgagataagcgcaagaacagatacaagcagtatccctttctgaaacttttgatgggccagtgccttgtaaggaaacaacgccatgagaataaatagagcgccacccgcaattaaagcaaacagctgccgcatgaagaaaaaattactgcttactccataccgggagacagctgtaatcatgcttgagctgtataccatcactaaaccgaatccgcataataaaacgattgcgaatatcagtgagtaatcataagattttagcattttttttaacataacatcctcttccctgcttctaactttcattatctatggtttttatgtatttatcttttttattttactacaatttatcaaacgagacgaagaatctctatacgattcggaaggaatgtgtaaaaaaagtccgtcttttatgagatgagagaaaaatagcggttataaaaaaacccaaactgttaataagtttgagttttatcatttatttagctgtaaacgcgtcatgtaaagcagacaattcgcgttccaatgtgtataaaaggtctttaccgtctttttcatcaaccaatcccaggcggacagcaaaatcgatttccctcgaaagcccgaacatttgagtatctaaaacctcttcatatagaggacattgaggcatcgttaagttatccatttgtactcggatcagcttcaaaatcttctcagcgtccacttttaagagttcaaaagctttttgccgatggtcaactatcatctctgaagccaaaagtatccctccgttccccaggcgagtacctaattcttctatttatcataaagggtatcaacagaaaatgcaagaggatttaagcatatgacataaattaaaaaatactcagcctgtacatctcagacattatttccaaaagctttacacctgcaatgctgttccctttttcgtctaatgcggggccgaatatgccgatcccgaaatcgtaaggcgaaatgcccataatcccgccggatacgccgcttttcgcaggaattccgaccttaattgcgaattccccgcttgcattgtacattccgcacgtcaccataaacgttttgcaaattctagcgacatcttttgagatgacttgctccccagtctctggatgtctgccgttcaatgcaaatacagatccgattttcgctaaatccaagctgttcatctcaatcgcgcattgcttcgtgtataaatccattactgcttctacatcatcttcaaaaatgccgtactgcttcatataataacacatcgcccgattaatcattgaagtgctgtattcagattcagccacttcccggcagtatgtaatctcttggttgtttgtcagccttctgataaaagaaagcaaataatcaagtctctctttcaccgttcttcctcttatcagacttgtcactaccaatgccccggcattaatcatagggtttaacggcttgctcggattcaccgtttcgagcttgataattgaattaaacggatcaccggtcggctcctgtccaacataactgaagaccttatctttgccgtattccattaacaccaaagcaagggaaaggactttcgatatactttgaagcgtaaatgttttttctacgtcacctgctgacagacaaacattattggaataataaatcgccactgacaggtcgtgtttatcagcttttgccaaggcgggaatatagctggctacctcccccttgtccgttacttttttcgcctttttcactaaggcttcaagctcatcattatgccggcataccatgcaaacaccctcgttccctcagcatttcaatacacataatttgtacacaaagtgacaattcatgcgaaaacttttataattttgagagaagggggtcatatcatgagcgttatccaagtaaaaggcaatgttacatatccaattaccattgatccaagcgtatggatttttgatgatcgcaaattttcgtttgaccgcaaaggggacagtcaagacacatatttacaatcagccggggatgaatccgaccttgatccagaacgcgtcatcagagaggggcgaattgcgccgcctacattaaagacggaaaaacaatatgagaagcaaaaactgatgaacggcagtttcgcaatgagacttgggactgtcctgaaaaatgctgagccgaacagctctgcgacacaatgtgtatttgtcacaagttcgggaaaggccgccgtttctctggaaaccgctctgaacagtattgtccatttcagtgaggcaggcaaaccgattcaagaaggcggccccgtgcatatttactttgaaggtccggtccatcacaaacagccgattaccgatgtaaaagagatcgaaatcatttaatgttacagcaaatcagctgcgagctgggcgagacctgatctctcaccttttaacagcttcacgctgcctgagatgggttgtcctttaaaccgctcaaccacataggccaaaccattgttcagactgtctaaatatgggtgatcaatttgttcaggatcgcccattaagacaattttactgccttcaccgactctcgtcagcaaagttttcacctcatgcctggtcaaattttgcgcttcatcaatgataataaattgatctggaatgcttctccctctgatataagtcagcgcctctacctgaattgagccaattcccgccaaaatagcatcaagctcccctggttttttcgcattaaacagaaactctaagttgtcaaaaatcggctgcatccaaggctttagcttttcctctttttcgcctggcaaatatccgatgtccttgccaacaggaacaatcggccttgcgacgaccagctttttgtatattcccaagtcttctgtctgtaatagccctgccgccaaagctaagagcgttttgccggttcccgctttgccgatcagggtgacaagcggaatatcttcccgcagcaaaagctctaatgccattgtctgctgtacatttttcggcctgattccccatatatgttcatcatcaaatacgagtctttttaataccgttccggttttatctgcaattccgactgccgaggaggatcctcctagctcatccttcattaaagcaaactgattcggataaaacgcatgctgtttcacatcgtttactgaaatttgattttttccgtaaaaagagctgaacagctgctgactgatatataaatctttatagccgctgtacatttcatcattgtccacaacccggtcattcaagaaatcttcagcaagcagtccgattgcgtcggctttaaccctgaccagtacatccttactgacgaggataaccggcctgccattttccttggtttcttcctcgaggctcaagtttttcgcaacggctaatatgcgattatcgttcgtcttttcaataaagatctcttgcagctggtgaaacgaacgatgattcagttcaattctcagtgtgccgccggtgtcaagcgggacatgctcatgcagcctgcccttttgtcttagcgcatcgattagcttagatacgtgccttgcattcctcccaacttcgtccatataccgtttttttgaatcaacctcttctaaaacgacagcagggatgacaacctcattttcttcaaaagaaaatatcgcgttaggatcctgtaataacacattcgtatctaacacataaattttactcaagtctcagcctcctgatataagggtcaaagttcttcctgcttctcttttgatgaaaaagatgaatgcctgctaaaatatatgtttttgtgcataaagatagaaggttaattcaacaataaaattaatgaaagcattttaaggagggaacccgcaagtgcgaattcttttcattatcatacagctgacacttatcctgtccgcttgtgcctatcaacaaggaaaacagggccagaatgttgaaaaagaatcaacaagacagcaggagactaaaccgattcacgtaaaggacacaactcaagaaacaaaaaacaatggaacaagaacggatattgccaaacatcttgtcagcgttgctgaaaaaaaccccgacgtcaaggatgcaacagccgttgtgctgggaggttatgctgttgttgggattgatgtcgatgatactttggacagaagcaaagtggaaaccattaaatattctgtagctcaggcgctaaagaatgatcgatatggcgccaacgcagtagtcattgctgatcccgatacggtcagccgccttcgcgaaatgagcagagaaatcagcgagggccgtccggtaacaggcatactggatgaattagctgcaattgtcggccgagtgcttcccgaagtgcctaacgatgtgattgacaatgaagacgaaccgcaaacaaagcagcaaaatgaccaattaaatagaaaacagcagcaggaaatggagaaggagcaaaacgatcaatctgatcatcatatgaaaaagaacaacaatgactaagctatagccttgcgctttagctttttcttattttggacagcttctgatccgtgctataatacatgttagtgaaagaggtgatatgatgagggtcaaatgttctatttgcgataaaattgaaacaattgatgatgataccctgatcgcgaaacggcttcgaaaccgcccgatccatacatatatgtgccaggaatgccacgatcggattgccaaaaaaacagaggaacggctgaaaacgggaaaatttacttttcacccgggacagcagaaaaaagaaaaagtcaaaaaataaagcgtccgcttaaccatacagaacacaaaaaagactcagctttcagctgagtcttttatgattttgcagactgtccttttttcgactgatacagccgaattttgtaaatgattaaaatcagcgcagcgacgatcaatccttctgccacgggcaaaaacacccctaaaaaagtcaaaacagtgcagcccaacgccaaaaatacatacaccactgcagattttaatacaggaagccgtttagcaaatccaagcttaaatacaataacggccaacacaaaaatcgtgccgtacagcagccacatgcctgccgcaggctgccggtctacttgatatagagcggcgaagaacgacagacgttcgcttacgtcattcaaaaagattccctcccctgtaaacgtacgggttctatcttttcaaattctgcacgagattaagacaatcctgctgtttttttctttttagctgctttttcacgttcgttcttattgaggatcttctttcttaaacggatggattcaggtgttacttcacaatattcatcttcgtttaagtactctagagactcctcaagagacatgatgcgcgcttttttaattgtagttgtctgatcctttgtcgcggaacggacgtttgtttgctgtttcattttgctgacgttaacaacaaggtcattgtcacggttatgctctccaacgatcattccttcgtatacttcagtacccggctcaacgaagatgacaccgcggtcttcaattccttgaataccgtatgatgttgcttttccgttttccattgacacaagtacaccttgacggcgtccgccgacttggcccgcctgcatcggctggtagctgtcaaacgtatggttcaaaataccgaatccgcgtgttaatgataggaattctgtagagtaaccgatcaatccgcgggaaggaactgtaaagatgagacggacttggccgtttccgttgttgatcatatcaaccatttcgcctttgcgggcacccattgattccatgacagagccagtatgctcttcaggaacatcaatttgcacacgttcaacaggctcacagcgtacgccgtcgatttctttgataataacttcaggttttgacacttgaagctcatagccctcacggcgcatattttcaattaaaattgacaagtgcagttcaccgcgtcctgaaacaacccaagcatcaggagaagctgtcggctcaacacgcaagctcacatccgtctgaagctgtgattgaagacgctcttcgattttgcgggccgttacatatttgccttcacggcctgcaaacggactgttattcacgacaaatgtcatttgaagtgtcggctcatcaatgcgaagcaccggaagcggatcttgatggtctacaggacataccgtttcaccaacgttgatatcttccatcccggaaaccgcaacgaggtctcccgcttttgcttcttcaatttccacacgctttaagccttggaaaccaaaaatctttgtaacacggaatgactttgccgtcccgtcaagcttcataagagaaacctgctgtccgactttcattgtgccgcggaatacgcgtccgattccgatacggcctacatagtcgttgtagtcaagaagggcaacttggaattgaagcggctcctctgcattatcaacaggtgccggaacatgcttaataatggtttcatataaagcttccatgttttcatcctgttgtttcggatcaagactcgctgttccattaatcgcggaagcatataccactgggaactcgagctgctcttcattagcatcaagctcaatgaacagatccagaacttcatcgataacttcctctggacgagcaaagtcacggtcaattttgtttacaacaacaacagggttcaggttttgctcaagagcttttttcagaacaaaacgagtttgaggcatacagccttcatatgcgtcaacgacaagcactacgccgtcaaccattttcataatccgttctacttctcccccaaagtctgcgtgtccaggggtgtccaaaatattgatacgtgtatctttatagttaatcgcagtatttttcgccaatattgtaatgccgcgttcgcgttcaagatcattagagtccattgcgcgttcagcaacctgttcgttggcacggaacgtaccagcctgatgtaaaagctgatcgactagagtcgttttcccatggtcaacgtgggcaataatcgcgatgttgcgaagatcatttcgaagtttcactttttcatctcctaaaaaaattagataactttcatattatatcacacatcctctttaaaagcgtcacgtttttctgtaaacttaatataagacgtaaaaggggatggaatttatgaaaaaaatgaattggcttttactattatttgcatttgcagcggttttcagcattatgctgatcggcgtctttatcgctgaaaaaagccctgcaggcattatcgccagcattgtacttgtttgcgctgtcatgggcggcggatttacattaaaaaagaaaatgcgcgaacaaggcttgcttgattaaaagcattgccccgccggcgacattgtaatcaaaaaacaccgcaaagaaagcggtgtttttcatttcttaagccttatctcccctgtttcttagtcaggaagatgcaaaacagccttcatacatagacaatcgttctaacgatcacacgtgcagccttcaaaaagtagttcggcaacgatacacataaaataccatagcgcctattcctccaccggaaactactccctataatggaatttgtagcacaattcataaaagggagagaagaaacatgaagaaaacatttgtaaaaaaagctatgttaacgactgccgcaatgacctcagctgctctattaacgttcggtcctgatgcagccagcgcaaaaacaccggttgataacactgctgttcaactccagcatcaggcgagcactaacgaagatctcaatacattcattgatatattaaatcaatgtatatacgaacaagacggtgtatattattttgacagcgacaaagctgtcgagttaggaatgacaaaagaagaggctcaggtaattgctacactctgggaatcgacatcagaatttttcagcattgtttcacaatgtgtgtatctcgaggatggaaattacaaatttgatacagaaaaagcagttgaacttggcttcacagaaaaagaagcacttgcacttgaacaatttttctccgctgtttctctcaagattcacattcttcaagcagccattgtgctacaagatgatgtgtacagctatgataaagacgcagcgctacaagcaggtgcaacgccactgcaagctgacgtttatgaaaaactcttcagtgccctgtcacaagaacagcttgccgctatttacgatatgattcatccccaggcttaatgtaaaaaagcgcttgccggaatcggacaagcgctttttttatatcagcagtttgatgatcagcatcatggcaaccgccgctccaaaccagcaggcagctttcatgatcagtaatccatagtacctctgtttaaaacgcagttcttcttccggcagaaaagcctcctcaacaacggcctgctcgctttccaattcaaatggctcagccatcgtgtcatacatgtctttgcagctgctgcacatttttaaatgctcttctataacgtgttccgtttctcttttacaatcaccttcaagatacagaggaagcaggtctcttactagaaagcaggtcatatccgctcctcctctctacttttcgtcatgtgtttcttaagttctaatctagcccggtgcaatgtggttttcaccttagaaagactccatcccaatatctcagcgatttcttcataagaaagctcttggaattctcttaaaatcaaaacggattgatgctgatcttttaacttcaggagctcctgccgcagtgtttcgcttttcaccgttcgtgacagatactgttcaggctgctcataagttgtttgcgttaacccttcatttttgctgatttcagtaaattggtatttgacatcccttcggtaccaattgataaaggtatgatgcgcaatggtgtagagccatgttctgatggaagaatgccccctaaacgaagccagaccgttaagagcttttacaaacgtgtcctgcgctaagtccttggctgtttcaagatgatgagtccttctgaataaataatttaaaatttcttgataatactgccgatacaagtcctcaatggaatccctatgcttcattaaaagtaaaaccacaccgtcatccaaatggccaataaaatgaaacagatatacatggaagacaggtatactttcatatatctgatttggctttcttcttcagcaccgggacttctctttaaacaagttttactctttaagtcttccgcattcttttgaaatagggattcatgctgtttcatccattccattgattcatcctctagctctccttctttatacaggtcgtataagtctacaaaaacagactctttttctttatgattcataaagacttttcacctcttgtgtttctccatccactacataggcatcatggcgatttgaaccaaacggctgaataatgatcagccatgcataatgccgttcatcccctctttgaacgataatcggacgcatacgctttttgtaaataacatcctgatatagagaagctaccttttcgtaagccaatgttccattacgatacgtataagggaatgactgatcaggtgtatcgctgtatacataaacgtttagctgaccttgatcttcaaaaaactcatatgttttagaagaatcagtatacatcaccatgtcaccctgactgctttttttcttcttttctgatccacgagcatcgaagatcgataatatctgatgctgcatccggctgttagccattgagatattctttttcatcggaagcgaaagactatgtaaacaacctgattcgccctcaaattccaaaacaattccaccttttgtttccactctcaccatgcttccgagcaggctattgctttcaatatcagtgatctgataaggctgttttgagatgttcagcgctgtaaacatttgttccactttgtcttgaatgtcttgttccgttatatgaacatgcagaagagagtcaagctggtaaatcgatagatcttcactaaaacccattaaggtttccttttcccaataaaataccgcgccatcatcagcatgatcttttttatgaagctggtttttcaggtatatacgtacgactgtctggccgtcctcatttgatacctttgtttcgatatgatccttatgtaacacacgtccgtgtcgctcaaggaaagcgatggacttccgcttgtactcctgattcgttagctttttcccatgtgctttttgtaagtattcataattacgaatcagctgcgatacttcatctacctcagctttgtaacctttgctttcaaatgagtagaaataatgcacatccatgtttgtatcatgcaaataaagtgtttcatccgtaggaaaaaatgactttagtatctgttccgctttttctgatgaaatgtgctccccgacaaaattgaatgaatcatggacatttgctggctttgatacagcgaaagcagccgttcctatgttatatatcggatttaacagcaggacaaaaaacaccaggacagccatcgtcacccacttattcacacgcacataaacctttcctgacttttggaacagatgatagctcatcaaaaatcccgccattgccaaataaatcgtatatggcattactgcaccataatcttttgagatttgattgggatatggcgcaagcagcaagacaagcagtccgataatcagcgtataaaataagcctagtaagatcttatccgttctccaatacagcttgaaaaacactacattcaacgcaatgggaagagtgatgatgaaaaacagaaacacgaatgcaatcggctccatcccatccgggtattccttccaatacgaaaagaaactaaaaatcatttgtacgatcggcaaactgacaacggcaaggtcgaacgtataaaacttaccctttccgccatgatcacgcggcatcagcatatagtgaaaagccgtcagcagcacatatccgtataacaaaaaatgcagcagcggcagcagttcttttccgtcctctcttaagtaagcgctggtgaagtttgttgattgcacctggtgaataagttcaacagacactcccgccagcagcacaatccgcaatataacacccgccaagaacattgtgcgctgccggtttattttgggatgatgcaccaaaagatataagcccgccagaacaacaattgaccattgaatcagcagggtgctttgtctgcttaatataaaataacattcaaaatgcaatacataatgactgaataactccaacaagaacaacaatcctttacttcttattaaggcctcattcggttagacagcggacttttcaaaaagtttcaagttgaaacaaaaatatctcatcttccccttgatatgtaaaaaacataactcttgagtgaaccgtcacatgacacttgactcatcttgatattattcaacaaaaacaaacacaggacaatactatcaattttgtctagttatgttagtttttgttgagtattccagaatgctagtttaatataacaatataaagttttcagtattttcaaaaagggggatttattgtgggtttaggtaagaaattgtctgttgctgtcgctgcttcgtttatgagtttatcaatcagcctgccaggtgttcaggctgctgaaggtcatcagcttaaagagaatcaaacaaatttcctctccaaaaacgcgattgcgcaatcagaactctctgcaccaaatgacaaggctgtcaagcagtttttgaaaaagaacagcaacatttttaaaggtgacccttccaaaaggctgaagcttgttgaaagcacgactgatgcccttggatacaagcactttcgatatgcgcctgtcgttaacggagtgccaattaaagattcgcaagtgatcgttcacgtcgataaatccgataatgtctatgcggtcaatggtgaattacacaatcaatctgctgcaaaaacagataacagccaaaaagtctcttctgaaaaagcgctggcactcgctttcaaagctatcggcaaatcaccagacgctgtttctaacggagcggccaaaaacagcaataaagccgaattaaaagcgatagaaacaaaagacggcagctatcgtcttgcttacgacgtgacgattcgctatgtcgagcctgaacctgcaaactgggaagtcttagttgacgccgaaacaggcagcattttaaaacagcaaaataaagtagaacatgccgccgccactggaagcggaacaactctaaagggcgcaactgttcctttgaacatctcttatgaaggcggaaaatatgttctaagagatctttcaaaaccaacaggcacccaaatcatcacatatgatttgcaaaacagacaaagccgccttccgggcacgcttgtctcaagcacaacgaaaacatttacatcttcatcacagcgggcagccgttgacgcacactataacctcggtaaagtgtacgattatttttattcaaactttaaacgaaacagctatgataacaaaggcagtaaaatcgtttcttccgttcactacggcactcaatacaataacgctgcatggacaggagaccagatgatttacggtgatggcgacggttcattcttctctccgctttccggctcattagatgtgacagcgcatgaaatgacacatggcgtcacccaagaaacagccaacttgatttatgaaaatcagccaggtgcattaaacgagtctttctctgacgtattcgggtattttaacgatacagaagactgggacatcggtgaagacattacggtcagccagcctgctcttcgcagcctgtccaaccctacaaaatacaaccagcctgacaattacgccaattatagaaaccttccaaacacagatgaaggcgattatggcggtgtacacacaaacagcggaattccaaacaaagccgcttacaacaccatcacaaaacttggtgtatctaaatcacagcaaatctattaccgtgcgttaacaacgtacctcacgccttcttccacgttcaaagatgccaaggcagctctcattcagtctgcccgtgacctctacggctcaactgatgccgctaaagttgaagcagcctggaatgctgttggattgtaatattagaaaaagcctgagatccctcaggcttttattgttacatatcttgatttctctctcagctgaaacgacgaaaagatgctgccatgagacagaaaaccgctcctgatttgcaaaaagagggatgcagccgcaagtacgcattttataaaagctaatgattcagtccacataattgatagacgaattctgctacaggtcacgtggctatgtgaaggatcgcgcgtccagttaagagcaaaaacattgacaaaaaaatttatttatgctaaaatttactattaatatatttgtatgtataataagattctcctggccaggagaatcttattttttgtggaggatcatttcatgaggaaaaatgagtccagcttaacgtctttgatttcagcgtttgcccgtgcttatcacagcaaatatgacacatctcttatttttgatgattttatcgcaaaagatctcattaacgaaaaagagtttatcgacatcagtaaaaatatgattcaaggaatatcgtttttcaacaaagagatcgccgaacgtcttcaaaatgatcctgaaaaaatattaaaatgggttgcacaaatccagctgtctcccacgccactagcacgtgcttcttattgtgaaaaagtcttgcacaacgaattaatcctgggggcaaaacagtatgtcattcttggagcggggctggataccttctgctttcggcatccagaattagaaaacagcttacaggttttcgaggttgaccatccggctacacagcaattcaaaaaaaataagctgaaggatgcaaatctgacaattccgggtcatcttcattttgttcctatggatttcaccaaaacgttttcgtatgatcctctcttagatgaaggatttaaaaacacaaaaacagtcttcagccttctcggagtgtcttattatgtaacacgggaagaaaatgcaagcttgatcagcaatttattttctcatgtcccgcctggaagctctattgtttttgattatgcggacgaaacactttttacagcaaaagggacgtcgaatcgagttgaacatatggtgaagatggctgccgcaagcggggaaccgatgaaatcatgtttcacttatcaagagattgaacatctgttagagtcatctggtttactgatctatgaacatctatcaccagacgacatcaatgaccttttctttagtaatcgaaaagacaatttgtcagcgtttgaaacgattcattatattcatgcagtaaaaaaataattttcaaatcatcagaagcctctcaatgtttgagaggctttttattgaacccgcatgcagcaaataagctgtcgttatcatacggcagcttctgctaaaggcttcaccaagatcataaatgatttgcctttctcatctttttccgttttcagctgttcaaagccgcattggcttaaaaacagtatccattcactgcgctcaatgggaactcccgcaaacatcgctttatgtttcgctctaagcaatttgctgatctgttcaatgatcatcttcgcatgtccctttttttcttcagccgggtcaatcaggaccgttccgagccacggcttaccgtttgaaggagaccactcgagatggtagctgacggcaacaggcagaccgtctttttcccatacaagccataaaccgttgtacatggagtaggaaatgatatagtcttctgcatctttatctccaaactcctcctctttccatacaggatgagcctccgcgagcttttctaacaagctgagatcatcctgctcaaatggcctacttccgagcatgaagatactcttcaaatatcgttttatgtatagatgggtttccggctagcacactgtggttttctaaaaaggtaaacggctctccttcaatggtcgtataggtgcctcctacttcatttaacagcacacagccggctgcgtagtcccatggcgcaagccgcatcgtgatgtaagcatctattcttcctgccgcgacatttgccagctctaaagcggcagaaccgtaggagcgtgtgcctctgactcttttcacaagtggcgctaacacactttgatcaattcttctgttttccgttacccatgttgcattaatggcaagaatcgcttcttcaatgacggtttcttttaaaggagccagcttcgtttcattcatataagctcctctgccgctaaatgcgtgatacagctcatcgtgcaccacatcataaattaagccgattttcccttcaccgttttcaaaaatcccaatggaaatcgcaaaatttctttgctgatgcacaaaattcatcgtcccgtcaatcggatcaataatccatacgactccctcaagtgagtggattttgtctccttgcccctcttcaccgagtatccgatgtcccggaaatgtttcttgaattcgatcaatgaaaaacttttcggtttctttgtcaatattggtgactaaatcattcggatttgatttcgtttcaattgtcaggctttcatgcatggattgtgtaattctcgcgcctgcttctcttatccacttctttgcaatctcatcaatttccgtccaatttgtcattcgttcgtacctctcttctatgtagaccttttattttataggatactgataacggcaatgaaaaagcaaggaaaatgaaaaatatcccttctcacgtaaaaacgaaccattcatgcggttcgttttcactatcgcttttttacccgttaagacgaatccattcttttctaagtcgctcaagtttgtttttgctttgttcaatctgctcttcattttccttctgcattgcttcatatagggttgccaattcataatcaacctctagtctccagacagcaacacgattgtttttctcttccttaaatccctcttttacaacttgcctcattgtctttcgccccttccagagatcatttgtttgtaaaaaagcatcccattttgccattcaacaatgattacttcttatatcgtatgattgttctatttacgcgcaacatgattctaaaaattgtgtgtttacctactcgtttattaccacatttccccttacttcaaacgcgctcaatctttttgaagctcgtatgaactgtgataaaatatgtatacttagcatgaaggaggaaaatcatgacacaaatgcgtttcactgaagaggactttaacacttttacaatagaaggcttagacgcgcgcatggaagtattaaaagagacggtccgtccgaagcttacagctctaggcgaacattttgccccaactttatcagctttaaccggagatgaaatgtttccgcatgtggcaaagcacgcaagaagatccgtcaatcccccggctgacagctgggtggcgttcgcaaacagcaaaagaggctataaaaaactgccgcatttccaaattggtttatgggaaagccacgtctttgtgtggttcgcgattatttatgaatcccctatcaaagaagaatacggcaaattgcttgaagtgaaccaagaaaccattacgaaaaatatccctgacagcttcgtttggtctgcagatcacacaaaaccgggagtacataaacagtctgaaatggacaaggaacagctgaagacactgtttgagcgtttgcagactgtaaagaaagctgagctgttatgcggcatccagctccaaaaagaagaagtgctgaatatgaataaccaggaattccttcagcgtatcgacgatgcctttaagcagcttgcttttctgtaccgtctcacccaaaaagtatcacaagcataaaaaagagccgggatatcccccggctctttttcttacatcttaatcttcgcgtgatcagattctctcgcctgtttgaccgtgcgataaggagaatatgtactttgttcctcaaactcgccgcatagctttttttcctcggccttccccggtacaatttccttgaaacggcggtaagctttaagcagttcttcacgatccgcccctttttcatatgcaagctcaacctgctggaaaaatgcaatcacatccactgcttcttcggttgtccaatcttcattcatcggatattgatactccattttcttcactccttgtagatttacttcccttaagagaaagcatcttcatttgatcataaattgttctttacattctttcaagttcataatataattcatttgttttacgtctaaaaaacggttgagaaactgattttaatacacactattatgcataggtatgattacaaaggtgggaaaacaattgtcgcaacatgaaacacccttatacacaggactgaaaaagcatgcaagcagacagcctgttcaattccacattcccggccataaaaaaggggcaggaatggacccagaattcagacaatttatcggtgaaaacgcgttaagcatagatttgattaatattgaaccattagacgatctgcacgcgccaaaaggcattattaaacaagcacaagatctggctgctgaagcatttggagcggatcatacatttttttctgttcaaggaacaagcggcgccattatgacaatggtaatggctgtttgcggacctggtgataaaattattattccaagaaatgttcataaatcaattatgacagctattgtattttccggagcggttccaatttttattcatcctgaaattgacaatgaattgggcatctcccacggaattacacttgaatctgctaaacgggcgcttaccgagcatccggatgcaaaagggcttctcgtcatcaacccgacatatttcggtgttgcagccgacttaaaaagcatcgtagaactcgctcattcgtttgatgtgccagtgcttgtggatgaagcacacggcgttcacattcattttcacgacgaattgccgctatcggctatgcaggcaggagcggacatagcagcgacaagtgtacacaagctgggcggatcactgacacaaagctctattttaaacatgagagaaggccttgtatctaaagacagagtgcaatccatcctgagcatgctgacaactacgtcaacttcttacttgcttctcgcttctttggatgttgccagaaaacgccttgcaacagaaggccgccagcttgctgaggaaacactcaagcttgccaatcagacgagagatcgcctcaatcagattgaaggcatttattgtgtcggttctgagattcttgggtcgaaagcagcttacagctatgatccgacaaaattgattatctctgtgaaaagtcttggcctgacaggacatgacgtggaaaaatggcttcgtgaatcctttaatattgaggtggagctttctgatctgtacaatattttgtgtattttcactcctggtgacagccaaaatgatgcagaccggcttgtagaggctttaactgagatcgcacagcaaatgtcagaacaagatgtaacacatcagcaaactgaggttctgcttccagaaatacctttattggcaatgactccgcgtgatgctttctatgcaaatacggaagtcatcccattaaaagaagcatccggacggattattgctgaatttgtcatggtatatccgcctggtattccaatcttcatcccaggagaaattattacagaagaaaacatcagctacatttttaaaaaccttgacgcaggcctccctgttcaaggacctgaggactcgactttacatatgatccgggtcatcaaagaacaaaaagcaattcaataaaaaataaaaagcatgcggctttaagccgcatgcttttttttactcttcatcaacaggacattgacattgtccgcagcaagttccatataatgttgttactttctcatcttcaaagtaatgaatggcttcgttgcaatcttggcaaacaatcgtacccatctcttattccccatttctttgaaatttgaaaacgcttaatttcttttgttgttattatattaatatgtcacatttaaaatgtcaacaacaaactgtataacacattttatttcatatcatcatattcaccttgtttttccattttccatcatacaatatcttcttcatacagaagctttactcgatatatatgccacagcacataatgtaattgcacgttttcttgaactttcatccaagaatgcagcaaaaaattcaatataccccaggttgctattttaaacgattgatataatatgtaatctcactttaaaaacggtttcaattatataacaattaggtaacaagaagcagattaagccgtctctcgtgataaactaaagctagttaactactgtttatacagaggagaagatagatgcgatatcgcgcggtattccccatgctgataatagtatttgctttatcgggctgtacgctttccaccatcaatccgatgaaaaaaagccggattgacaacattcatcatacacaaatcctgtttttttctgatgagaaccaaatagaccaggaagcgccttattacgatgcactgcttgatttagaaaaagattatcccgagcaaatagataaaatgaaggtctatgataaaaaagaaggctgggaagatgagattgaaactgtccctacccttatggttgttgatcagcgccatgtcgtggtgaaaatcgagggatgtgtgaaaaagaaagaagacatcattaaaccattacagcatgtgctgtcaaaataaaaaaacagccctcgctcaaagcggggctgtttttgatatgaaaattattttacgatgtgaatcggacttccgattgccacttcagcagcttccattgtgatttcgcccaatgttgggtgagcgtgaattgtcattgcgatatcttcagcagtcatgccgccttcaatcgctaagcttaattcagaaatcatatcagaagcacttgctccggcgatttgcgcaccgatcacaagaccgtcctctttacgagtgatcagcttcatgaagccgtctgtttcgttaagagaaagcgcgcggccgtttgctgcaaatgggaatttagcagcaacaatgtcaagaccttcttctttcgcctgtgcttcagtgtaaccaactgatgcaagttcaggctcagagaaaacaaccgcaggaataccaaggtaatcgatttctgcaggctctccagcgatagcttctgcagcgattttaccttcgtaagatgctttatgagcaagcggcggtccttcgatgatatcaccgattgcataaatgttaggtacgtttgtgcggcactgtttgtcagttttcacgataccgcggtccgtcatttcgataccgacttgctcaagaccaagctcatcagtgtttggacggcgtcctactgtaatcaatacgtaatcagcatcaacagttttttcttcgccttttacttcgaaagtaactgttacgccgtctggtctttcttcaacgcctttagccatcgcgtttgtatggatttcaacgttgccttttttcttcagtctgcgtgtaacgagagaactcatttgtttttcgaagccaggaagaatttcatctccgccttcaagaataacaagttcagtaccgaagttagcatacgcagttccaagttcagttccgatgtatccgccgccgataacaacgagctttttaggaatttctttaagagccaaagcgccagttgaattcaggacacgctcactatatttgaagtttggcaattcgataggacgagaaccagtagcaatgattgcgtttttaaacgtgtatgtttgagcagagttctcatccataacacgaactgaattgctgtctacaaagtaagcttcaccttttacaacatctactttgttgcctttaagaagacctgctacaccgccagtaagcttgttgacaacagaagctttccattcttgaacttttgtgaaatcaactgttacattctcagcagtgattcccatgtcatcagaatgttttgcattctcataacggtgacctgcattgatcagcgcttttgaagggatacatccaacgttcagacaaacgcctccaagagttgctttttcaacgactgttactttttgtccaagctgtgcagcgcggatggcagctacatagccgccaggtcccgcaccaattacaagagtatctgtttcaatagggaaatctcctactaccataacattacgcctccattaaaattaattgtggatcgttcagtaaacgcttgatgtgatttaatgcattttgcgcagttgctccgtcgatcatacggtggtcgaagctgagagaaagagctaagactggagctgctacgatttcgccatcacgaacaatcgctttttctgcaatgcgtccgataccaagaatcgcaacttctggatggttgataaccggagtgaaccattgtccgccggcagaaccgatgtttgtaattgtgcaagatgcgcctttcatttcagctggagcaagcttgccttcacgagcttttgttgcaaggccattgatttcatcagaaatttcaaagacagatttacgatctgcatttttcacaaccggtacaagcaagcctttttcagtgtcagcagcgataccgatgttgaagtaatgtttttggatgacttcatctgttttatcgtcaattgacgtgtttaaaacagggaattttttcagtgcagatgtaagagcttttacaacgtaaggcaagtaagtcagcttgattccttgatcagcagcaacctgtttgaactgtttacgatgtgcaacaaggtttgttacgtccacttcgtccattaacgttacgtgaggagcagtgtgtttagagttaaccatcgcttttgcaattgctttacggataccgctcattttttcgcgtgtttctgggaattcgccctctggagctggtgcagcagccggtttagcagctgtttcttgtggtgcagctgtttcttgcggtgcagcttcttgcgctcctccgtttacaaagctgtcgatatcttcttttacaacacgtccgttgttgcctgaaccagtaaccttacggatgtctacacctttttcacgtgcatatttacgtacggaaggcatagcgatcacgcgtttgttcgggtcaacttcagcttgatcctgctgtcctgcgccagtagcttttgcaggctcttgagcttgctcttctttcgcaacgtcttgtccagcttctgcagttgactgaacttgtgcttcagttttcgcatcgtcagactcgtcgctgcctttaaattgaagatcttcgtaaccaggtgcatcaaacgtaataatcgtttgtccaacagttgcaaccgttccctcttcaacttttaattctaatacttttcctttaacaggtgaaggaatttctactactgctttatcattttggacttcagccagtacatcatcttcgtctacctcgtcgttaggcttgacaaaccattttacgatttcgccttcgtggataccttccccgatatctggaagtttaaattcaaatgccacagttctcgacctcctagtttgattaagcaattttaaagtttacatcgtaagcattgaaaacagatatataatagagggaaaacgttcatcttccctctcgattatgcagtttgattaaaattcaagcacttttcttgctgtttcaagaacgtctttatggtttggaagccatacgctctccgcttgagagaaaggaaatactgtatctggcgctgcaacgcgaagtacaggtgcttccaagctcaggatcgcacggtcattaatttctgctactacgtttgcagcaataccggcttgtttttgtgcctcttgaacgacaatcgcgcgtcctgttttttctacagaggcgataattgtatcgatatcaagtgggcttactgtacgaaggtcgacaacttcagcagaaatgccgtctttttcaagctcatcagcagcttttaatgattcatgaaccattgcgccgtaagtgatgattgaaagatcagtaccttcacgtttcacgtcagcttttccaagctcaattgtgtattcttcttcaggaacttcctgacggaaagaacggtaaagcttcatatgctctaagaagacaacaggatcattgtctctgatcgcagaaattaaaagtcctttggcatcgtaaggagttgatggaataacaactttgataccaggctgttgtgcaacaagaccttccaagctgtcagcgtgaagttcaggagtatgaacaccgccgccgaatggagaacgaattgttacaggtgaagtccagcgtccgccagaacggtagcgcatacgagccatttggccagaaactgaatccattacttcataaacaaatccgaagaattggatttccattaccggacggaagccgtttaagcctaaaccaagggcaagaccgccgataccagattcagcaagtggcgtgtcaaacacacggtcttcaccgaattctttttgcaatccttctgtcgcacggaatacgccgccgtttacaccaacgtcttctccgaaaactaagacattttcgtcatttttcagttctgtgcgtaacgcatccgtgattgcttgaatcattgtcatttgcgccatggcttacttcgactccttctgtgtataaatttcaaattgctcctcaaggttgtgaggcattttttcgtacatgattttcattaaatcagttactttttgcttcggttcagcatcagcttttttgatcgcttgcttaatttcttctttcgcatcctcaatcacttttgcttcttcttcttcagaccataagcctttgttttcaaggaacgcacggaaacgtacaagcggatctttttgttcccactcattttcgatttcttttgtacgatatttagtaggatcgtcaccagccattgtgtgcgggccataacggaatgtaagtgtttcaattagtgttggaccttcgccgttgattgcgcgctcgcgtgcttcagcagttgctgcgtatacagcaagcggatccattccgtctacttgtacgccgacaataccggcagctacagctttttgtgcaattgtttcagctgcagattgtttttcaacaggagttgaaatcgcgtaacggttgttttgcaccacgaagattgcaggtgctttataagctccggcaaagttaattccttcgtagaagtccccttgagaagctccgccgtcaccagtgtaagtgattgcgacagctttcttaccgcgttttttaagacctagcgcaacaccggcagtttgaatgtattgagcaccgataatgatttgtggagaaagggcattcacatcatcaggcatttggtttcctctgaaatgtccgcgagagaaaagaaacgcttgatataatggaaggccgtgccaaattaactgaggcacatcacggtatccaggaagaacaaagtcttctttttcaagcgcgaaatgcgttgcaatctgagaagcttcttgacccgcagtaggagcgtaaaatccgagacgtccttgacggtttaatgagatagagcgttggtcaagcacacgcgtaaataccatgcggcgcattagctcttttaattgatcatcagttaaatcaggcatcgccgcttcattcacgacttctcccttttcatttaaaatttggaacgtttcgaactgctttttaatggcatcaaattgcttcttactgtcaacgatagcttttttcgtttttgcagccatactaagtcacctcttcctttcttttaaacagtcattagacgtgcattccttttatacatacaaacttagggtaccctaaagtatcagcagtaagtcgtattatattttagccgatccccagtttgccaaaaccttttatgtaggatagttacactctgctttgaactgtattatttcgaagttgtaaaaaactaatacaacaccgcttaacatggattagtttacaccaaataaagaagaaccgtcaatcgttttcatcgctgattttcaataaatgtattcgctttacattttcatcaaaaaaacagatgccaaccgcacccaaaactgtactagtataccttactatgctgtactacaatagaaatgaaaattttgaacgaaatccgaatcgcatttcattcaaaaaaagagctgatcgagtcagctctttttcacacgatagcctgcagcgtcatataaatcttcccgggctttattatatttttcggtttgttcattaaattctccgctatatttaaggatcttttcataagaagcattgactttatcgatctgctgatccagatcatctcttgtcaaatctttgtctttcagctgcatatacagttttttattaagctcaagcgcttttttatactctttatacatagtgccatatgatgtatatcttttctccatatggtttgctgcggcatcggccttttcttttatgtctttttccttaatatgttccgctgacgtttttgcttcctcaaattctgtttccgattttttcatgctgtcattttcaagctttaggtgttcttcgcgcttgctgacattttcaagcgccttattagataaagcaacaatttttttataatcatccatattgagcttcataacactatcgtaaagctgattttctttggcctctaattctttgagtgtgttttgttcttcttgaaacggcttttccgattccgcggctttttctaatgaatgatgaagtgaatcaaccgggtcctgtcccatgcatcctgttaatatcagtgccatggcacaaaaagctccgatcttgattccaggccgccgttttatagcgtctttcacgttaaatcccccaatcttgacaatttctactatagaatccatggggacatttggcaatagccgtgctgtataaatgcaatactgaaattaaatcaaaaaagtgaaaaatcaggacagatgaccatacaacttttttgtttttacataggttatattagacgctatgcctacttataaaggctctggcgtaattaaaagaggaggttatgtaatatgtatggatatggttacggcggaggctgctgcagttatggtggttacggatatggtggctgcggatatggctacggccgcacctttgcgctaatcgttgttttattcattctgttaatcattgtcggagctgcttatttaggtggaggctgttgctaaccacacagcatgaaattgaccagccatatacggctggtcattcgtttcgttgcacctttgtgaagaaatccgatataatttacatattaagctttaggagtgaagtttcttgattactatggaaaacatcgtacgtgacggccatccagccctcagagagactgccgaacctgttgagctgcctccaactgatgcagaaaaacagcagctggccgacatgatcgaatttgttaaaaacagccaaaatccagaattagccgaaaaatacaagctgcgccctggcgtaggactcgcagctcctcaaattaatatcaaaaaacgaatgatcgccgttcatgcggaagatgcttccggtaaattatacagctatgctctgtttaatcctaagatcgtcagccattcagttgaaaaaagctacttaacaagcggcgagggctgcctctctgtggatgaagcgattcccggttatgttccccgctatgctcgcatcagagtaaaaggaacaacactagaaggcgaaaatattgatattcgtttaaaaggatttccggctattgtgtttcagcatgagatcgatcatttgaacggcgttatgttctatgatcatattgataaggaaaatcctttcaaagaacctgaaaatgcaatcgcaattgagcgctaaaagagaaaacggctggcacaatgccagccgtttctttattttaaaaggcccaattctttgacagcgtatgcaattccatcctcgtccaccggttttgttacaaagtccgcgatttctttcagttcgggaacagcatttcccatagcaacgcctgtcccaacgtattcaatcatttgcaaatcatttaatccgtcgccgaaagcatatgtatcgccgatatcaaacggaagacgctcaatcacttttttgattccttctgccttcgaacctccgtgcggcagaacatcagtcgatagctcatgccagcgaactagatcaaactcaggaaaagcggcataagctttttcttcttcatcctgacaaaataaaagaagctgaaaaatttcttttccttcataaaaaaggtcatcggtctctggataatctgttttaaggctgccgattccctcgagaacatgggggtgatccgcaacagtcgctttcatcgtgtcctcagccataaacacaacaggatgcttgccttcatccgcctgctttaataatcgcctgattgcattttcaggcagcggatttttataaatcacttgattttcaaagacaacaaactgtccattgtaggaaataaatgagtggatgcccagctcctccaaaatcggcttaaccaaaaatggagaccggccgctggcaataaacacatgatgcccttggcgctgaagctccgccacggtttttctcgtactttccggtatattcttatcatgatcatatattgtgccgtcaatatcaaaaaagattaatttagaatccatcgcaacttcccctttatcgtcttggtctgcaattcccaccctcatcatacaaaaagattgtcattcagcaaacaatttcgttcaaaaatcatattaaattccattaataaccacgaaaagtcttcctcaatctccgtatactatttgtataaaagaactctgggacaaatttttcattaaaggagggactggctaatgctgcgtaaattaagaaagaaactcagaagacaatggaacggaatgctccgtaagaaagcaattgcctgacaagggatctttcactttttgagagatccttattttgctcaaggctttccttatattccgttttcgaatataatagaatgagcgagtctaacatacggcatttaaggagagatttggaatgatttataaggtattttatcaagagaaggctgacgaagtacctgttcgggaaaagacagattcactttatattgaaggcgtatctgagcgtgacgtcagaacaaagctgaaagaaaagaaatttaatattgagtttattacacctgttgatggtgcattcttagaatatgaacaacagagcgaaaattttaaagtattggagttatgagcggtatgaaatttgtaaaaaatgatcagactgctgttttcgccctcggaggtttgggcgaaatcggtaaaaatacgtacgcggtgcaattccaggatgaaattgtactgattgatgcggggatcaagtttcccgaggacgaactgctcggaattgactacgtcatccctgattatacgtatttagtcaaaaacgaagataaaattaaagggctttttatcacccacgggcacgaagaccacatcggcggtattccatacctgctcagacaagtgaatattcctgtatacggcggaaaactcgcgatcggcttacttcggaataaacttgaagagcatggattattgagacagacgaaactgaacattatcggcgaggatgatattgtaaagttccgcaaaacggctgtgtcattcttcagaacaacacacagtattccggattcctacggcattgttgtaaaaacgccgcccggaaacatcgtacatactggggatttcaaattcgactttactccagtcggcgagccggcaaacttaacgaaaatggccgaaatcggtaaagaaggcgttttgtgccttctttcagacagcacaaacagtgaaaatccggagtttaccatgtctgagcgccgtgtaggagaaagcattcatgacattttccgcaaggtggacggccgaattatcttcgccacatttgcgtcgaatattcaccgcttgcagcaggtaattgaagctgctgtacaaaatggaagaaaagttgccgtatttggacgcagtatggaatcggctatcgaaattggacagacactcggttatattaactgtcctaaaaatacgtttattgagcataacgaaatcaatcgtatgcctgctaataaagtaacaattttatgtacaggaagccaaggggaaccaatggcggcgttatcaagaattgcaaacggcacacaccgccaaatttcaatcaatcctggggatacagtcgtattttcttcatcccctatcccaggcaacacaatcagcgtgagtcgaacaatcaaccagctgtatcgtgcgggtgctgaggttattcacggccctcttaacgatatccatacatccggtcacggcggacaggaagaacagaagctgatgcttcgtttaatcaagcctaaattcttcatgccgattcacggtgagtacagaatgcaaaagatgcatgtcaaacttgcaacagattgtggcatcccagaggaaaactgctttatcatggataatggtgaagtattagcacttaaaggcgatgaggcttcagttgcaggaaaaatcccgtccggttcagtgtacattgacggaagcggtatcggtgatattggcaatatcgtacttcgtgatcgcagaattctctctgaagaaggacttgtcatcgttgttgtcagcattgacatggacgacttcaagatttcagcgggtcctgatttgatttccagaggatttgtgtacatgagagaatctggtgacttgatcaacgacgctcaagagctcatttcaaatcacttacaaaaagtaatggaacgaaaaacgactcaatggtctgaaatcaaaaacgaaattacagacacgcttgcacctttcttgtacgaaaaaacaaagcgccgtccaatgatcctgccgatcattatggaggtttaaaaaaagaggcactccctaagggagtgcctctttttattgcagtgatatgtgttgaaatgattttacatcgaataatcccgtagtcgtcattttaatatcaggaatgacaggcaacgctaaaaacgacaatgtcaaaaatggattaaatccgcctgtgaaaccgattaacgacaatttatcatgaagcgtcagcaagctttgattcacttgctctgcagattggtcggataataaccctgcaatcggcagcggtactgaatggagctcttccccattttttataattgttaatcctccgccaatttcctgcagcttattaactgccgccgcgatatcctcatcattcgttccgacggcaataatattatgggagtcgtgtgaaatggttgtggcaatcgctccgctcttgaatccaaaacctttcacaacaccaagtccggtttcttttaatcctttatgccgctcgacaactgcaatctttaacaaatcaagctcagtgtcaggctcaaattcgcgggcaacaggagccggaacttgtactaatcgtgtttcaagctgatttggtatgatttgaatgacattgatctgctgctctgaatcgattggcatatgaaaatcctgtttgttaagaggagcagcaagcttaacagaatcaagcagtgcctgatctggtgctgcagttgaagcatgatcctgatagaccgctttgctgtcttcagcaacagtctgcccttttaccatcgtcattgtgacagtgacattttccagatcagatacaaaaagcaaatcagcgtcaaaacccggggcaatcgctccctttgtatctaatccgtagcattcggctgcattgaggcttcctagctgataggctaaaaacggattaagtccggcttgaatcgccattttcacctgatggtttacacttccctctgacaataaatcatccacatgcttatcatccgtacagaaaaagaaccggcgtgcgttcttttcattcaccgccggcagcacattgagcgtgtttttggcgactgatccttcacgcatcatgacatacatgccccttctgatacgatcaagggcttcttccttcgatgttacttcatggtcgtttaagacaaatgcggttctgtaaatgttaatgaggtctgttgataaaccagctaaatgaccgtctatcctttttcctgccacacgggcatcaagcagtttctgaaccatgtctttttcagcctgctgaaccgacacataatccataacttcagccagccctaatacttcttcttcttcataaaaaggcttgagatcggcagctttgagaattgcgcctgatcgctcaaaacttgcggcaggcacactggaaggaagcataaaatggatattcagcggtgtatgccgagcttgttcaagcataaactcaatccctttttcaccagacacattcgcgatctcatgcggatctgtaacaaccgtcgtcacgccatgaggcaacactgctttagcgaactcaatcggtgtaaccattgacgactcaatatgtacatgtccatcaataaaacccggaacaatcatttgtccctctgcatcaatgatattttcgccttcatactcaccgaggcctacaataactccatctgtaatcgcaatatcttcatatatccattcttgattatatacgtccatgatttttccgtttttaatgacgatatcagctttttgtcttttggctgaagcattcagcctattgactagcgcttctttattcaaataggcccctcctttttttattatatggtacaatatgctatcggaacgcctgtgcttagtcaatgaaattttaagaaattgacgctcagttcattaaagttgttatattctgataatatgaaaaaccgccctttgaggacggcttatttggctgctattttgtatgaagaactcttttttcgaaacgggagatgtctgtaactgatccaataacaatgagtatatcttcttggtggatgacttcggttgcaagcggtgatacgatgacttccttgcccctttttatggctacgatgttaataccgtattttgcgcgaatatctaaatcgagaagcgtatttccagccaggcggctgttagctacgatttcaacaagactatgctcttcagacagctccaaatagtcaagtacattgttggacacgatattatgcgcaattcgttttgccatatcgcgttccgggtggacgatgtgatccgcaccaattttagacagcactttttcgtgataatcgttctgcgctttaactgtaatcgtatggacgccaagttctttcagaatgagtgtcgttaaaatactcgcttgaatattttccccgattgctacaataacgtggtcaaaatttcgcaggcctaaatttttcaggacagattcgtctgtcgaatcaccgataactgcgtgagatgcaatcttggcatactcgttgactttatcttcatcgatatccattgccataacctcgacgccttcttcgcttaatgctttgcaaatactgccaccaaaacggcccagcccaattaccgcaaattcttttttcatcgtggtgctcctttatatgacatgatattgatcaaattttatcatattcttttgttacagtgttatccttttggcagcgaattcatatgccgcttgagcttttcagtaaactcaggcgacaaatacagctccgctccgcgttcgatttcaatctgatagtgctgaggcggggcaatttccgcttctttttggaggacgagaaaggttaaacagtctttgtagtgccttccgccagcttcaacgtctacaaatgccggccgatacgtaagagattcgacgccctcccttttatatagataggagagagcagaataagggatacggtataaaacgccttctgttgttcctccgtcttccaacatgtccgctcttgaaccgtcttccctttttagcgtgaagcgggttgtgtatccttttaaaacagctcttcctactggatcttgaaaatagtgatcgactcccgctttttgaaagcgggcattatccatgcatgatccataggcaaaataataaatgggatttttcgatttgctgatcatctgatgttctttccagtcgccgctgcttattttcgtaaaaccggcacacccgtctttgttcataaaataaataagcgcaattttaatcccgacatccgtttctacaaacaccgtttgtttatgatatccttgaaaaaattgatcgagcttatgtatacacaattcatctgcttcatatacttcgccatatatatagccttcatcttcatcattgaaaacagctgcgggcacctcttttgcagcaaacaaacttccctttgttctcgcctgctcattgatacatgccgattgtgccagcaaatgatggtttttttcatgctttcttaatgtcccgtatacaaacagaagcgagttcactttatttttctcctctcagctgtctgattttaaaggcaaaaccacttgaaagacgctgccttttccagcttcactttcgattttcaattccccgtcatgttccttcaggattctcaaacaaatgggaagtcccagtccagtgcccttttcttttgttgaataaaaaggtttgccaatctgcttcagcttttcctgcggcatgccgtttccttcatcctttacgcttatcactgcatgagaggcggttttagcagttgaaatggttacgacaccaccctttggcattgcctcaattccgtttttaatgatgttgataaagacctgcttcagctgattttcgtctccattaatcatacagccatctgtctctttgaaatttttctctatgacgatattggacagaattgcattggtatcaagcaatgtcgtgacttgtttcaagatctcattaagctggtgtgttttaaatgtgattgcctgcggttttgcaagcagcagcagctcgctgagcactaaatcgattcttttaatctctgaaaagatgatgtcaaaatagtcttttctgtccggatattgtgttttcataatctggaggaaaccactgacagatgttaaagggtttctgacctcatgagcaatacctgcggcaagttcacttgtgattgatagtttctgggattccctcgccagccgttcattaatctcaatgagctcatcttcagcctctttccgctcagtgatatctgacattgtacccaggctgcctgtaaattggtcatcccggtcatagtaaagtttataatgaacttctccccaaaaaatcgtgccgttttttgtcacgtattttgccgtaaacatgccagaagacgctttgttttggatttgggtgttaatgtggtcggctacgtgcttttcttttatgaagtaatcgttatacattgttcccatacattcactgattgaaaagccggttattgatgcccacgcttggtttaaatatgtaatttcgccttttgcattcgtttgaaatacgatttcctgcaaattatccatgatgcggtttttttcttcagaaagctgtttatacttccattcgttatccttcattttcttaaccagctgctgtttctcatcaatataataagccagcatccagacacttaccagcgtgactgcagtatacacaatatcaacaggccaattaatcgggtttttgcctataaaataaaataaataatcccaaaacattataaaaatcattgccaaaatgatggaaatgatacgagcttgatattttctcatatgaccacctgccgcttgtgtttctctacttattgtaccattcttcgacaaataattgagtaaaatatgtaaagtatcccaaatcattcattaccaaatatcttgatgtcttatcttaggcggcggtaatcaaaaattggcacgcaaaaaaggcggagatgacatcactccgccttttttagcataattttattcttttaaagcggcttgaatttcttcgagaagcagctgtgcaccctcagggcttagcgtaattttaccgttgccgtattctttattttctgaagtgatttctccagtcattaaacaaacgccatgaggtttgtactttttcaagataattttatctccgtcaacaaaaaactcaatgctgtcttttatggcaatatccaatgcccgtctcaactcaatcggcatgacaatgcggcctaattcatctacttttctcacaacacctattgatttcataaaaacccttcttcctttaaatgtttcttttctcatgtaatgttttaaggatgtacctcaatatatcgtagacgaatgaaactttgaaaaagtttcccgctttctataagaattacaagatattttttccataaaaccgaaaaatgtattacttctgttacacagttccttgattttttacaaaaacatttctttaccgacgcacacccccaaaaatcgcagtatttctgagaaactttaaatgtagaatcatattaaattaggatagagattgggtgaaaacatgtttcaatcaactgaaatcgggattgacttaggaacagctaatatacttgtttacagcaaaaataaagggattatcctaaatgaaccatctgttgtcgcagtggatacgacgacaaaagcagtgcttgcaatcggagctgatgcgaaaaacatgatcggtaaaacaccgggaaaaattgtcgctgtcagaccgatgaaagatggcgtgatcgcagactatgatatgacaactgacctgctaaagcacattatgaaaaaagccgcaaaaagcatcggcatgtcgttcagaaaaccgaacgtagtcgtttgcacaccatcaggctcaacagcagtagaacgccgcgccatcagtgatgcggtgaaaaattgcggcgcgaaaaacgttcatttaatcgaagagccagttgcagccgccatcggagcggatttaccggttgatgagccggttgccaatgtggtagtagatatcggcggagggacgacagaggtcgctattatttccttcggtggcgttgtttcctgccattctatcaggatcggcggagaccagcttgatgaggatatcgtttctttcgtccgtaaaaaatacaatttgctgatcggcgaacgcacagctgagcaggtaaaaatggaaattggccatgctctgattgaacatataccagaggcaatggaaattcggggacgtgacctcgtgacaggtcttccaaaaaccattatgcttcaatccaacgaaattcaagatgcaatgcgtgaatccctcctgcatattcttgaagccatcagagcgacacttgaggactgtccgcctgaattgagcggagatattgttgatcgcggcgttattttaacaggcggcggcgcgctccttaatggaattaaagaatggctcacagaagagattgtcgtgcctgtacacgtggcgcaaaacccgcttgaatctgtagcaatcggcacaggccgttctttagaagtgattgataagctgcaaaaggcaattaaatagtctttacccgcaaaattctcacacgcggcaaatttcttgcttcttttttcctcacttccttcatattgtgggaaatggagaaacgttaaggaggaaacagatgctaagagatttaggaagaagagtagcgatcgcagccattttaagcggaattattcttggaggcatgagcatttctttggcaaatatgcctcattcgcctgcaggcggcactgtaaaactgaatcatccataatattgaaaaacccaagacgtgtcgttttgggtttttcactttgggctccttctttcctttataggatcatatttgatatgatgagaaaaaagcttggaggaatgattcatggattcattttcacagaaattaaatacatatgcacagctggcggtagaagtcggcgttaatgtccaaaaaggccagtatgtagtcgtaaatgcttcaacagacgttcgggattttgtccgtttaattgtaaaacacgcatatgaaaagggcgcaaaaaacgtcaccgtgaattggcaggatgacgaagtcgccaaattaaaatacgaacttgcgccgtttgaagcatttgaagaatatcctgaatgggaagcaaaaggcagagaagagcttgccaaaaatggagctgctttcatttctgttgtgtcgtcaaacccagacttgctaaaaggtatagattccaaacggattgcggcattccaaaaagcagcaggcaaagcattacatacatacagacaatatattcaatcagacaaagtcagctggactgtcgtaggtgcggcatcagcaggctgggctcacaaggtgtttcctggcaaatcagaggaggaagcgatccaccttctgtgggaagaaatttttaaagcgacgcgcgtaaatgaagacaacccggttcaggcgtggatcaatcatgaccaaaatcttcatgaaaaagttgaccatttgaacgagagacattacgctgccttacattatcaagctgaaggaactgatttaacaattaagctgcctaggaagcatgtttgggcaggtgcgggaagcgtgaatgaaagcggccatgagtttatggccaatatgccgacagaagaagtgttcacgctgccgcaaaaagacggggttgacggtgtggtatcaagcacaaaaccattaagctacggcggaaatattattgaaaatttcaccctgacgtttgaaaatggccgtatagtcgacattaaagctgaaaaaggtgaggatattttaaaagaactggtggaaacagatgaaggttctcactatttaggtgaagtggcacttgttccttacgattcgcctatatcacaatcaaacattcttttctataacacgctgtttgatgaaaacgcgtcaaatcatttggcgatcggaagcgcctatgcctttaatattgaaggcggaaagcagatgtctcgtgaagagcttgtcaaagaaggcctaaatgagagcattacacacgtggactttatgatcggttctaaggatatgaatattgacggaattacggcagacgggaaaagagagcctatcttcagaaacggaaattgggctttttaagtaaataaaaggaggcttttccgcctcctttttttatttttctgcttcatacatttgcagattcgcataaacggtttctaatactggtgcagcgagagataaacgtttagctttttcaagcaaaaatccatgcaggtggtcgccttctgtcgtttggccgttttccatatcccgaagcatggaggacttcatatgataagacatgctggtcatcgtacgaaagctctcttcctcaagatccggatcagccggaacaccttcttttcgtaaaacagcgcaaatttccccaataagagtttgggccgtgtgacgtccggcttctgtggcgaggattgggccaagcggtcgttgaaataacgttgtgatccccgcttgcgctgcaataaagagatactttttccaaatgtccttctcgatatgcccgctaatgatgacttcagccttcacacctgaaaatgcctcttcaaacgctcttatccgctccgtacgctcgccgttccattctccaaatacaaaacgatgcgatgcgctcgtatgatgaatttctcctttgttgtctaaagcactttctataaaacacaggccgcccagcacctgttcttttgaaaatgccgcaaatagctgctcatagtggcggtacccatttaaaaaagggagaatgacagattcctgatggataaatggtttgacatcgtctatcacttgaacaagcgagtatgctttagaagcaatgataacgacatcaaattgccctgtttctccggcactgattagttcgggctgaaatgatacattccctttttcactatggatgacaagcccggtttttttcagctgctcagctcgtttttggcgcacaagaaatgtcacatcatttcctttctccgaaagccgtccgccaatatacccacctactccacctgctccgacaaccaaaaatttcatgttgtgatctcctttcatatttaggtatcaaaaaaagcagagaaatctctgcttttttattcggcgtatagttcagtcaattttttctgcacatcagcattttcaaggaactcgtcatagctcatttgcttatcgacgatgccgttaggtgtaatttctataattctgttggcaatggtctgcacaaactgatggtcatgggaagtaaacagcatagcgcctttaaagctgattaagccgttattcagcgctgtaatggactccaggtctaaatggttagtcggctcatccaaaattaaaatattggcgccagaaagcatcgctttcgacagcatacagcggaccttttctcccccggaaagtacatttgcttttttgtggacttcttctccagagaacagcatgcgtcctaagaaaccgcgtaaaaagctctcactttggtcgtgcggagaatattggcgaagccagtctacaaggttcagatcactgccttcgaaatattcgctgttgtcttttggaaaatacgcttgagatgtggtaacaccccatttaaacgttccgctgtcagcttccatttccccggaaatgattttaaacagcgtagtaacagcaagttcatttcggccagtgaaagcaattttatcttctcgattcataataaagctgacattgtcaagcacctttacgccatcgattgtttttgttaagccttccacgcgaagaacatcatttccgatttcccgttccggcgtgaagttaacataaggatagcggcgggaagacggtttaatatcatccagcgtgattttttcgagaagtttctttcttgatgtagcctgcttagatttagacgcattggcgctgaatctagcgacaaactcttgaagctgtttaatctgctcttcttttttcttgttcgcttcttgagaaagctttaacgccagctggcttgactcgtaccagaaatcatagtttcctacatagatttgaattttgttaaaatcaaggtcggcaatgtgcgtacatactttatttaagaagtgacggtcatgggatacgacaataactgtgttttcaaagttaatcagaaactcttcaagccactggattgcctgaaggtccaagtggttcgtcggctcatcgagcagcagaacatccggcttgccgaataatgcctgtgccaagagaacttttaccttctccgaaccgccgaggtctgccatcttttttgtgtgcagatcttctgagataccaaggccttttaacaggatcgcagcttcactttccgcttcccaaccgttcagttccgcgaattcaccttctagctcagcagcacgaatcccatcctcatctgagaaatcaggcttcatgtaaatagcgtctttctcctgcatgacttcatacaggcgtttgtggcccataatgaccactttcagcacttcatactcttcgtactcaaaatggttctgcttcaagacggcaagacgctcgccaggactcatatgcacgtcgcctgtctgaggctcgatttcgcctgacagcacctttagaaacgttgatttaccggcaccgtttgcaccaattaacccatagcagttgcctggggtaaatttaatattaacatcttcaaataacttgcgatccgcaaaccgcaagcttacattatttacagcaatcatttattatcctccatcatgtctatcatcaataaaagtataccatgaatgcagggcaagagaaatgattccctgataaaacagagagaaaacacttatacacccaaaccagccagctgtgttacaattaaagagagagaatgcatccgctcggaaaattacacactctcatggaggaacacgttgaggcttttaacacttactgaatattgcttactgatcttttttacgggcttttaccttgccgtaacaggctttaccgccaaagatatcggcttatatataggcatagcccttatttacatattttcgcacattttttctaaacggcttttagaaaagcgcggaaaagagaacaaacaggttcaccttttcttcagtgtgctagctattatcggttcagtgttcatcacggttttatgcattgcattggtcgcttctttttcaaaataaaaacgcctgctgtcttaggccagcaaggcgtttttattttgtttgacgcatttcgttaaacgggaaaaagacaaacttcgatgtgccgacaattcgatcttccgcgatcagtcccagcccgtttcggctgtccatcgaattcagccggttatctcccatgacaaagtatttgcctttcggaaccttaaccggtccaaagtctcctgtcagactgacaccaagtttttctgcttccttcttgtttttagacaagtaaggctcggctacttttttaccgtttatataaagcgtgtcatccttcatttgaacggtttctccaggctttccgatcaatctttttacataatggattttagaagtttcaccgttgataataacgatatctccgcgcttcagctcgccgatatagttgactgttttattcacaaacagcctttctccgtcatgtaatgtgggatacatagatgaaccttcaactaaatacggttcaaacaaaaagtgacggatcaggagagccagcagaacagcgatgacaatcgctttaccccattccaggtacgtattggtttttttcttcgccgttttctcagtattcgtatttttttcctcggtcaaagtgtttcctcctagacaattgctatgtcagttgtttctcttcttttactttatcataaaaaagaataaaatacataacttaaccgcgctccctgccggccggataagaaaaagcgtcctttcgaaccaaggacgctttttttcttatttttctgtaacaggttttttgacgataccgaggataattgccatcacgacagcaccgatcacgatacttaaaaggtaaagcatcggatggtttgtaatgaaagctacgaatactcctccatgaggcgccggaagcgttactcggaagaattcagttaatccgccggcaacagctgcaccgactacagcagctggtatgacgcgaagcggatcagccgcagcaaatgggatcgctccctctgttacgaaagcagctcccatgaaatagcatgtaataccagcttcacggtcacgctgagtgaatttgtttctgaaaatggttgttgcaagtgcgataccaagcggaggaaccataccgccggccatgattgctgcatgaggcgcatagttgcctgcatcgatcatggcgataccgaacgtaaaggctgctttattaagcgggccgcccatatcaatcgccatcatgccgcccaagataatacccattaacacaagatttccagtaccaaggctttcaagccagtttgttaagaaattcataaatgccgctacaggtgtattgacgacaaattgcattaatacgccagtgataaaaataccgaacagcgggtaaatcaaaacaggttttaatccatcaagtgactgagggataaacgtaaatacttttttcagtaaaatcacgacataaccggcaaggaatccggcaattaagccgcctaagaatccagcattcgcttgagtagccataaatcctccgaccataccaggcgcaaaaccaggacgatctgcaatactcatcgcaatgaaaccggccagaactgcaacaatcagttttaatgcattgtcgccgccgataaagtttaatgctgctgcaaacgtgttgtagctaggatcattcggatcagcagagtgaattccccagaagaatgaaatcgcaacgagaataccgccgccgactacgaacggaagcatgttgctgacaccgctcatcaggtgcttataaaacgcgtttccgataccgcttccagacttgcctttcgcttcttcatcgtcgtttgaagctgctgaaccgccgccgctgccttgataaatcggcgcatcttgattcatcgctttttcgataagctcttgcggacgtctgatacccgccgttacaggaacttgaagtacgcgcttgcctttaaaacgttccatttcaacctgcttgtccgctgcgacaatgattgcaggtgcatcttcgatttcttgggcagtgagcttgtgcttaatgccgcttgacccatttgtttcgaccttaatttccacaccaagctctttcgctttttctttaagggcatccgcagccatgaatgtatgggcaatacctgtcggacatgcagtaaccgctaaaatttttccttttccggcaggtgctggtgccgcttcctcttcctcttcctcttcgtcatcatctttatcgtgctgattaataatgtcgatgatggcatcttcagactcagcttcaaggagctgcttacggatttcttcacgcattaacagcgttgaaagccttgacaacgcttcaaggtgagtgttgtttgcgccttcagtcgccgcaatcatgaacactaagtgagccggctggccgtctaatgattcataatcgacgccgtcttttgaacgtccgaacgcgatcgccgggttgataacgcttgccgttttcgcatgggggatagcgattccttcaccgatacccgtggagctttggctttcgcgatttaaaatggcttctttataggcttgtcggtcatttaactttccagccttatcaagaacagtgaccatttcgtcaataacattttctttttctttgctctcaatattaagctttatcgtatgcttcgttaaaagctcagttattttcacttgtgtttcctcctctatagacgtgtgaccttaacttcaggaagaagctgctggacaaattcttctgttccaagttcttcagagaacgcggtagcactgcctgaagtaactcctaagcggaatgcttcttcaagcggcagctgtttggaaattccggcaaggaaacctgcaacaacggaatcccctgctccgactgagtttaccaatttcccctttggcacgttagcaaaataaacagcttcgttcgtaaacagaagcgctccgtctccggccattgatacaattacatgttcagcgccttgttctacaagctttttcccataaggaacggcttcctcaacagatgtaatggccgtgccgaacatttctccaagctcatgatgatttggcttcatcaaaaatggtttcatttctgttgctttcaaaagagcctcgcctgagatatccagaacaactcgtgcgttctgctgtttgcaggcctctgcgattttttcataagtatcgtgagggagtgaagatggaatgcttcctgcaagaacgacgatatctccctcttgcaaagattggaactgttctaaaaaggctttgaaatcttcatccgaaattgtcggtccctgcccgttaatttcagtttcatcaccagttttcagctttacattgatacgggtatccccttttacttcagaaaaagctgtttccaggttttcttcccgtaaaaatgttttgatatattctccggtaaatccgccgacgaatccgagcgctttagacgccacatggtgtcttttcagcagtctcgatacgttgatgcctttgccccctggatacttggtatcatacgaagaacggttcaggcctcctacagtaaaatcttcaacgtgaacaatataatcgacagatggattaagtgttacagtgtaaatcatggtttcactacctttacgacagttttttcttggtaattatcgaatgtaagctcttcagcgtcagtcgtaatgattgttgcgtcgcctattccggcgaatgccgaaaatgaaatttctccgaacttcgaagggtctgctaagacgtaagcgtgttttgcctgtttgatcgctttctgttttaaaagggcctcatcagggtccggcgttgtgaatccagcctctgtatggacaccgtttgtccccagaaaactcttgtcaaatctgtactggtccatggcaatcagtgaagcgcctccaataatcgcgcccgttctgtgctttacgtatcctccaagcagataaaaagaaatttctttccttattaatgcatcgatatgcatcaccccgtttgtgacaacgacaatatctttggttttatccataaaatcaatcatgtgcaatgtcgtcgtgcctgcatcaaggtaaatgcaatccccttcttctaaaagagaagctgctttttcagcaattttcaatttatcgtgaaggtttttggatgatttttcaagcatatcgggttcaagtctgatatcggaaagcttggccgctccaccatgaacgcgctttaaaaaaccgcgttcttcaagtgtcgataaatctcttctgattgttgattcagaagcattagtcagatttataagctcttgaatctttaccacatcatgcttttctatttgatcaataatcaattgatgccgttcaggagttagcatgcttcacctcctaatgaaaacgtattcattttgaatacaatttcattgtaaacgctattttcggtttaggcaactaaaatcattcaaattcattcaataactatcaaaatctttcacgtttctccatattaacgtatgtctatagggtttgtaaactgtaaattcgacaaaaataaggacaattgtacgacattttcttcttattttaatgaaaaaagtcttttatattcatagtagaaatcactaaacataaaaaaacctcatgcatgttgcatgaggctactcataacgcagcgcttcaatgggatcaagctttgcagctttatttgcaggaagcatgccgaaaataacaccaatgagcatactgaacagcacgcccccgcatacaacctgccaggatatgagtgacggccagcccgcaatggctgaaacaagcgcggcccctccgtatccaataccaatcccgaccagaccgccaatcagcgtcaatacgactgattcaattaaaaactgagtcagaatctgtcccctcgtcgcaccaagtgattttctgattccgatttcccgcgtccgttctgtgactgatacgagcataatattcatgacaccgattccgccgaccaaaagggaaatacctgcaattgagccgataatcgtcgtcataattgcagttactttgccaattccggccgcaatctcttccatgttcatcacttgatacgaatcctctgtgccatgattgtcatttaccagctgtgccgcttcttttccagccgattttatgtcgtctgctgattcgacctgcaatgatacgttactgaaatcacttgtgccaaaagaggatttcatcatattaaatggcacatacatttcacttaaaccgaaagaaagcaagcctgtttcttttttcagcacgccgataatttcaacgggctgtccgtttatccagacaacttcacctaaaggggaggttttatcgaacagttcttcagccatcttttgagagatgattccggctctattccccgcgagaaagtcattgtcggtaaatgttctgccgctttcgatttctaaagaattgacattcatgtatccatcatttattccgttaaccgtagcatcggtttcttcttcgtgataacgcgctgtcatactttcagaagtcgaagcaacgacttgtttaatgccttctattccttttaaacctttaatatcgttttctgtaaacgtagattcagctgcggcgttcgggttgcttgcaagctcctcgtcgctaggcatatagtacagctccacagtatttcccgggccgctgatcgactgcttcagcatttgctcgccgccctgtcctaccgcaacgacaacaatgacagagcctacaccaatgataatgccgagcatcgttaagatcgaacgcattttatgggcaaggacagagcttagagccattctgatgttttctaacaggctcattctcccacactcctttgtccggagctggcaggaacaatgtttccgtcacgcaccatgacgatccggttcgtgcaatctgctacttcaggctcgtgagtaaccagaacgattgtcgttccctcggcatttaatgctgtaaactgatccataatcgcctcgcttgttttcgtatccagcgcgccggtcggttcatcagctaaaatcaatttcggctcattcacgatcgccctcgcaatcgccacccgctgcttctgcccgcccgacagctcgttgggcatgtggagcattcgatcggctaacccgaccttttccaatgctctctcagcccgctcttgacgttcttttttgcctatcccggagtaaatcatcggcagctcgacatttttttttgcgttcagccgcggaagaagctgaaattgctgaaatacaaaaccgatggaccggttacggactgccgccagttctttatctttatatgaagaaatgtcttcgccgtccaattgatatgtaccggaagtcggccggtcaagacagccgataatattcatgatcgtcgattttcctgatcctgacggccccataatcgagacatattcaccttgatgaatgtccaaatcaatagaatggagaacatcaaacgtttcctttccgatctggtagctttttcgcacattagaaagctgaatcatttaagatttcacttccattccgtcagtcacctgatcagatggattcaaaatgacttgatcatcttgggtaagcccctctttaatttctgtcaggtcatctgtcacttcgccgattttgacatcaactcgctttgcttttccgtcttttactgtatacacataatattggtcatcttcttttttgactgcctttgaaggaagcgtatttgctttccgtttatctgtttcaatattcatgataattttaaagcctggctttccttctggaagatttccttttattttcacttgaagcgggtattggaccgcctgttctgttccttgtgccgcagcgctctcctgctgatccggaacaagcccgactgcggaaaccgtgcctttccatgttttaccctgtattacatctgaagtgagtgtgaccttctggccttttttgactttcaatgtatcgtattcagacaatttccctgagacgacaaggtcttttgggttgccgatatgtatgacaggctcttgaatatctgactttttggatgccgcctcttggttgacagaaataacggtgccttcaatttcgcttttcacttcaagatctgatacccggttggcaagtgactgtcgctgaagctcggtttgttttaattcgatctccgctgtttttttctgcatttgaagctctgttcgttcagattcgatttgtttttctgcttctttctttcctacctgtttttccagttctctttctttgctgtccaaggcttttaacttttcttgaatttggtcaatttgaagccggttggattcagacgttaactggttctgttctttttccaggctcagctgctcatttgtataagtgactaaaggcgtgccctttttaactttatcgccttccttaactttaatgtcttctaatgtccctttatccgcttcataaaagacatactgttcatttgaaaattttagcgtgccaggaaccataaccgttgatgagatttcattttcttcaacgctccccgtctgtatctccttgccggcgctgccgcttgttggagcggcagaccggtatatattgattccaacaaaaagagcgactataactgcgattccaattccgatccagacttttttcatgagcttatgcacccgccacagaattgattaaacctgaaaaaagcgaaaatacaactaaaattccgaatagaatgattgctgaaatccacccggcttttttggagatgcctcccgttttgtgaagtccgattgctaataatacaaagctccagatgctgaaaatttcaaaggtatttaacacgctggcaagagccccgtcagatgggataatccctgccagtgacgtcgtgctgtaaagaggattcacgtcagtcgtaaaagcaacgattccattaaccaataatccgagactgctaattaaagagacaaacagaccgagagaaagcatttttttatatgtcgtaactccgcctgatatttttacacagagccaataaataagaggggcaataaataatgctgcgataccgccgataatagcgcctgccattccgccaaatttggttattgttgcgacagtttccatttgttcagcagatagcccttgcgtatcctggcttttcaaaagctcactataatccgtaccgagtgattgcagcacggcaccgacgatgataattgctgcaacaatcaaaagcggtccccatacagccggcctttctcttattctttcaaattgaacggacggacttgtgattactccgaaaagtgaaggcttttcagtcgccgttccgctgtttttttctacattcgtttccatttcaaaacctccttgagatatctaacaaatagtacgggaaggatatcaaaaagtttcatgtttttctaataaatttccaaaaaccttcaatattgaaggcttttcatattattctatcgctgtgctgtattgcgctttcacaagcccggcataaatgcctcctttagcgagcagctgatcatggttcccttcttctattttcctgccgtgatcaagaacaatgatgcggtcggcgtcgcggatcgtagacaatctgtgagcgatcatcactgctgtacgccctttcagaagcgcttttaacgcttgctgaatttttacttctgtctctgtatcaatgcttgccgttgcttcgtcaaggatgataatagccggatcggcgagcaatgctcttgcaaatgaaatgagctgacgctgaccggcagacagtacgctgcctctttcctccacctctgttgcgtatccttccgctaaatcggaaataaactcatccgctccgaccgcttgggacgctttcatcacctcttcatccgaagcatttggccttccaaaacgaatattttccatgatggtcccagagaaaataaatgtatcttgcaggacaatgctgatttgagagcgcagactggcaagggaaagatccttaatcggtataccgtctattttaatggtgcctccggtcgcatcataaaaacggctgattaaattggcaatcgtcgtcttcccgctccctgtatgcccgacaagcgcaagcgtcgagcccgccggaatagagaaagaaacggcgtaaagggcttttcgtttttcatcatacgaaaattcaacctcttcaaaactgatctccccatttatcttttcattatgaatggcattgggcttctccttgacatttggctgttcgtccagaaactcaaaaatccgttctgatgatgccatccccattaacagctgattatagacctgacccagtctcgaaataggttcccaaaacattcccagatagaaagcaaaagaaacgaagacgccaatcgtaatggtttcattcatgatgagtgtggctccataccaaatcaagacagccgtcccaatcgcattcgtcatttctaccagcggacggaacatggcattttttctagttgcttcccgccatgattcgtagttctcctgattgacaccgtcaaaatacgccatgttttcttcttcctgcgtaaatgcctgtgtgacccggatgccctgaatgctttcgtttagatgagagttgagcttcgattgcttcagccgtaccgtttgccaggatcggcgtattttttttctgagacttgttgaaataaaaaacataatcggcaatgtcaccatgatggctatagtcagctcagggctcagcgtaaacaaaataataatcacgccggccagaagcagcaagtcggtcaacaaattgatgactccgcttgtaaagagctcctgaagagagttaatatcattcatgatcctgactaagatcgatcccgccgaccgctgatcaaaaaatcgatgggataagcgctgcacatgggtaaataaatgctgtcgcaaatcgtaaatgacatgctggccaagctgattcatccacctgattcttaacacattggcggcgtaattgaggacatataaaccgctaataataaaaatgagctgaatcagcagctccgagtttctccctgtaatcgcttgatcaagaacataaacgccgatcaaaatggggatcacaagcttcacagcagtgccaattaatacggtgagaaaagaaagcggcaaaattgtttttcgatatggtttgacatagctcagcagccgccacatttgagcccagttaaacggcttttcaatgatttcatctgaagagtaatagaaacgctctaaaatcccctgttttttcgcttgtttcatttggcccctccctatccgacctcatgcggctcattaatcattttgacatcacggtattgcaaatcgtaaatctttttatagtagccgcctttttcaagaagctcatgatgtgttcccctttcacgaatgcgtcctttattaaaaacgagaatttcatcggcgtgtttcagtgaagaaatgcggtgagcgacgataaaggttgtgcggtttttcatgacttcttttaaggcaagctgtatgctgtgctccgtttgcatatctactgcacttgtggcatcatccaatattaaaatgctcgggttcaagcagatagctctcgcaatggcaatacgctgtttctgcccgccggaaagccccattcccctctctcccagcatggtgtcatacccatcaggaagctccataataaagttatgagcctgtgccctttttgccgcttcgatgacgtcgtccattgaggcatccggccgcccatacgaaatatttgatctaatcgtagatgaaaacaggaaggattcttgaagtacgaccccgatattggagcgaagggtttttaacgaataatccgtgattggtttgtgatcaatggtaatcattccgccaacaggactgtaaaatctggtgagaagctgtgtcactgagcttttgcctgaacctgtcgggcccaacagtccgattaccttcccgctgtttgcctcaaagcttacattgcacagcgcgtttgtttgttcttttccgtatgcaagagaaacatttttgaaatggacatctccggttaatttttgtttatacaaagcatgaggatgatctgtaatgtcttcttctttttccagaatgtcgagcaggcgttcccctgacgcttttgcttgagagaacatattgatgacaaaacctaagttcataatcggccacatcatataattgacaaggctgaagaaagcaacaagctcgccgggattgagctgattttgcataaccaagtaaccgccgtatgagaggagagctacaatacaaatgttaccaatgaactccattaaagggaaatacgcagaccagatggatgatgtttgtaaatactgcgccctgtattctgcattggctttattgaaagtgctgatctgaaaatcttcccttgaaagagatttaaccgtattaatgccgctgatattttcctggacttttgtattgagtttcgcaaacgatttgcggatgcctctgaaggcgggatggactcttttgtcaaaccggtataccgcaaccgcgagaaatggcagaacagctattgtcacaagcgtgagaggaacagaatagtaaaacataaccgacaggctgatggctaccagcaggccgaagcgaatgagctcagcgagaccgtatgataagaaaaaacgaagcccttcaacatcagcagtcagcctggacatcaaatctcctgttttcgcgttatcatagtaagaaaaagaaagccgctgcagtttttcatacagaccatttctcagccgataaacggatttgatcccgaacatatcacctaaatactgatgaaaaaaggtagccattcctttcaaaaccattaccgcaataaatcctaagctgacccacgccgcaagctgatactgccgtcccagcacgatctcatcaatcgtaatttgcaggataatcggataaacgacagtaattgcagtcatcaaaagcatggctagaagcgaccacataaacacttttctgtacggccaataatacatttttaatcttttaaatgtctccatatccagcacctttccaacatttatcatcttcactatatcgatacccgaaataaatttctattatttttcaaaatttcagtctaattatggagtgagtctcttactttatagggagtaacatatgtagaataaacgcttacagaaaatcattgtatgctgaggatacttggggatatgccaatgaaatacagaaaaaccggacggctgaaatgccgtccggttttcatcccccgctgaccggcggtatgatggctaccgtgtcacccgaagatacagaggtattttcttttacatagctttcgttaacggcaatcatagccgtatcaatagattcaagaccgtattgttcttttagactcgcttttatttcatctgtggttgcttgttccacatctatttctattgcttgtgtaccggcctgttcagccagtcctgcaaataaaagaattttaatcatgctgctctccctcgcttaggtctggttttccgttcggataagctgttgtttctagctggtcgccgatccattgctcaccgtcttcccaaatttcttttttccaaatcggcacaatctgtttaatgcgttcaatcgcatactcattggcttcatatgcggcttttcgatggggagaagatacagcaatcactaccgctgcttcaccgatatcgagcacacctatacggtgcgtgatcgcagctgaggcaccttcccatttttcttcgatttcagcgccgatttgagcaagcatttgcacggccatcggttcatatgcctcatattcaagccgaaccgttctttttccgtttgtccattcccgaaccgtaccaataaatgtcgtaatggcccctgcttcccgtttctccacttttttgatcatgtcttcagtattaatgggtgttttcgtaatctcaaaccgttccattatgcagattcccccttcagctgtgaaagcacaaaatccacggcaaccggatcatccgcatgaaaaacgggtaatccctgatgctctgtcatttgctctttttttctatagatgacggcgattatatttactgcttgcagcgcttccagatcttccttttcacttaggataaccactttaggataaggggcttttttaaagccttcaatcagaagacagtctgtttcgagaaattggtataactcgatcagccgtgccaaatcccaattgcggcgggcagtcagctgtaacacaccagcaccttctaccgctgttacaccagcacctgccgccttgtaacggtccgtgtcttttccttccgtgagcgtttgcggttcaccgccgtgaccatgatgcttcaggcagcccaaatggactccctgttcagaggctttttcaagaatgcgctcaataaacgttgttttcccgctgttttgaaatcctacaacttggacgatcgggaaaggacggaccaaggccattcacttccattctcttctctgatgagcagtacttgaaccgttctgccagattcgtagcctcgcgtgccgcccggcaggataataaatgcattggcatctgcaagtgatgtgacagagctcgacttatctaaaccaacgggtgtcgccaacagcttcccttcctgatggtgcacgagcgcacgaacaaatcgggtaaatgggttcggcttcggaaaatccttggtcaaaactgcttccgcacaaattgaatgcggtgtttcattgagcagccatgtctggattatcggtttgacaaacagttcaaaaccgacatagcatgccgacggattacctgaaaggccaaacagcagcatatcgtttgcatgcgccaccgttgtcacgctgcccgggcgcatggcaactttattaaacagcacgtccgctccgagtttttcatagatcgcaggcaaaaagtcaaagtcaccgactgacacaccgccagttgtgatcaggaaatccacctttttcatcgcttctttaactgcagcaaagcttttatccagatcatcagagattttccctaaataaagcggtgttgcgcctgcttctatcgcttgcgcatataccatactcgcattgctgttgcggatttttcccggttccagcggatcactgacattcagcaattcggtaccggttgcgataatcccgactacaggctttctcacgacaggcacagatgcgtatccgaatgttgccaaaagagccgtcactcctggtgtcacccgggtgccctttctcagtaaaacactccctttttgagcgtcctcacctgtttttgaaatattatcccccgtctgaaagcggcgttttaaagacataaatgacttcccattctcctcaaaggtttgagtcagttcaatcatgacgactgcatctgccccttcagggatttgcgcgccagtcataatccgcacggcctgaaacgggccaagttttttttcagatactgctcccgctccaatatggtcaataacttcaaaccgaactgggttttcacgtgaagcttctgccgtatcgcatgctctgacagcaaaaccatcgtatggcgaacggtcaaacgcagggacgtggtgatccgcagttatatcttcggctaaaaaccgatgaaggctgtcttcaagcgccacccattctgtttcaccttgtttttgaaaatggcagacacgccgaactgcctcgtctaccggtatcggtgttcttttctccagcattctgacccctcctgttgttacagtccaatcactcttgccaacacggagttggcttctttcacatcatttgttccatgcaccagtgcccgtccgtcattgaaaatgacaattctgaaatcctcgtaaaaaatatgcagcaaaaacgcattagcctcgaccttgccgattgttttcagccgcttaatgagttcctgtttcgggattctttttaatgattctgaccttacctgcactgtatcacggccgcatagtacagcagcttttggtgtgttccaatcctgaagataaggatataccgcatttgctccgcaagatgggcattcctcacggcgtacatgattaacgttaatcttcatatgcgaattgttccagacatcaaatgtcacaaaaccccgctgtattgcttctatttggccggttaacagctttaatgcctcagcctgctgatatgctgaaacgatatgcacagcaggcggaataatgccggcagtatcacacgtcgccccgccgacaggaatttgctcaaacaaacaagacagacaaggggtttctccgggaatgacagtcatgaacattccctggctgcttacacaggcgccatagacccaaggtgtctttgttttctgggcaagatcgtttatcagcatgcgggtttcaaaattatctgtcgcgtcgatcacgacatctgctttttcaatcagaggctcaagcgtttcggctgttccttcggtaacatacgcctcaatatgtatctcgctgttaatcgctgatagatgctctttggcagccatggctttcggcatgcggagtttggcatcgctttctgtataaagctgctgcctctgaagattgctccactccacatagtcacggtcaataatggtaatcgtaccgactcccgctctcgaaagtccttcagctcctgcagtgccgagcgctcccgctccgacaatcagcacatggctgtctgccagtcttttctggccctcttccccaatttgcttaaatctgatttgccgtgaataacgttcctccatcaaacctgttctccttatcttttatgtcatcttatcatgttattgccccgtcagtcccgcttgagggagttcgatttttcttccaaacagctaaaatcatcacgtgtattaatgttgataaactctgccgggtttgctccgatattttcagcctgtacgtaacaaaccgaaattctgcctaataaatctgatattctcaacctcttctcagaaagctgatcgtatagaactggcatgatacgtttgtggtaaatcgcaatcaatggctgcacttgtccgtctgaaattgggactaccgcgtccgcaccgacagtcatcagacgtttgagctccagcatcgtccttctttgtatcagcggtgtgtcacaggaaagaacagtacaaagatcaccgtctgtctttttaaaagcggtatatataccagccaatggccccatgccttgaaatggctcagcatcttgatacacttcattttcaccgttttcttgaaatctatcaattaattcgggacggctgatgataaccgtttgttctccaagtgcctctttagcgcattcgtaaagcatcctacccttccatttgacaaacgccttcggttctccaaagcgacgtgaggctccccctgccagcagtacgtttacatgcttcatatcatctcacctctagtttcgttaaaagcatagcaaaagcaaaggctcaacgctactgcttgtctgtttattaaagaggaatagctgttcagtatttgcatattgtagtgttaacatcatgagggagatggttcgaatgaaaagatcaggtccttttttccacgacgtgtctcaggagaacctttatttaaaatccgagctttcaaggtgccataagctgatttctgaacttgaagcaagctactttcatcagaaaaataacaaactgctcaaagaaaatactgatatgaaagaaaaactccagcagctgtctgccgaattaacacatatgtcaacaaaagaaaaacatgcctcccacaccagccaaaccctgcaccaaataagagctgaactgcttgataaaatcgttgttttgcaggagcttctatctgctgaaacctataaacgcagagccgaaatcgaagaaaaacataaacttcatattgctaaagtcaaaatcgaagaagaaaataaaaatcttcataaacggatcagcgaacttcaagcctcaattgagcaggaacaaaatgcactgcttcaggcaaaacagcaagccgaattgataaaagccgaaaatgggcgtctaaaagagcaaatggtagaaaaagaatatcagctaaaacatattaaaatagaagttgatcatatgaaagatcgaatcatagaaacgaaagaaagactgctagacatagaaaaaacgaaagaaaaattatttcacgaaactattatatcgtataaacggcagcttgatgaaaacgatgcctggattgcttctcattttgccgatattgatggcggcacgaaacaaaaagaaaaaacggaagaagaagctccagcggtctacgcgcagccaaatcatgtagagactatccttgaagatgtcaccaaacagatacatgtgcttcaaaaacagcttgcccgcgcccaatcatcagaccaggccaagagccatacaatcgaagagctgaaaaacagagccgctgaagaaaagccttatcaaaagtgggtgtataagcttaatcttgaaaaagaaaacaaaccttcacagaaaaaacctcaataaaaaaactgcttgagcgatgccaagcagtttttctttatatttattcatttgctgattctgcagattcgatttcaccctctaaaatgtactgcccgcgatatggctttttcacttccgggtacattttaattaagctttgcataaatgttgtcatattagggatttcaagaccgctttctttttcaatctctttttgaagctccgagctcttaatcgccgcgttgtggcgttttaatgttttaatagcagcttcacgcagcttagctgcttttgatcccggtcttgccgttcctcttcttcttcgtgttgttccgtctggtataccggcaggaagagaggaaatagattgaagctgaggctgaacagactgctgctgtgattgcggctgatagcttctgatttcctgagccgcaagctcagcgagaaccggcagagagtcaggttttttttcagaacggaaatcctttttgatttcggaagggcttccatttctgtccagctctcttaattttgcgtatattttatcacgttcaatttgatattcacgaatgactttcacttcagcttcatttaattgttctaaccgcaagcgcaaagcttctctttcattaaacattcctcaatgtaccccctatcaaaattaacatctttaattaagatattagattacaaaagtaattttatcaactattattttagcattttactattatatttactctatgaaaaattccttattttctgaaaatgttttatttttcaaaagagtcctttattctcaagggattaaggggctttctagtttatttggtataatgttgaaaatatatattttacttacttctttaaagaaatttagtgtaatatctacaattttcgagttatgagatatgagatttatctaaaattgaggaaaaacatcaaaaattagctgtgttttctagcgtatcaatcaaacaaaccatcaattcctatacccaaatttggaaaaataagcttcttactcttcttccattgctttttgcacaaataaaaaacctgatgtgatcaggtttttaggaaatactatttagtcagatacctattccgtttcagccagaacgcggttcacacgtttttcaagcattttcataccgctcccgccggcttggaagtgacggagctgtcctgttttatcaaacacataatatgcaggtacatattcattttcaaatgcatcggttaaagcatggtcactgtcaacaaaaatcggctgagtgatatcgtgttcagcagctgtttctttaattttaccaaggtcaagatcatcttcggaacgaggcatatgcacagctacaacattcagctgatctttatatttatcacgaaattcattcacttgcggcatcgcttctttgcacaagtggcagctgatggaccagaaatgaataagcgtcggcttttccccaatcaattgctctctcgtcacttcaccatttaaccaagctttttctcccgtcaattccggcatgggctgacgtaatttcattgcttttccctcctatttaacagaaaggcctaacgaatatgctagaccgcttttcgttcttggaaagaattaaagtgttttttggcctggcttccagttagccggacagagtccgccagtttgcagcgcctggagaacacgaagcgtttcatcaacatcacgtccaatgttgttatggaaaacagtttggtattggagctccccttcaggattaataataaacaatccgcgcaaagccacaccttcttcttcgattaaaacaccatattcccgggatacctcatggtttgtatcagcagcaagcgggtatttcagctggccaagaccgttttctttgcggtctgtattgatccaagctaaatgagtatggatggtatcagttgaaaccccgatgacttctgcatcaagatcttcgaactcgtcatagcggtcggacattgctgtaatttctgtcggacaaacaaaagtaaagtccattggatagaagaacagcactgtccatttgtcgtttttcatgttttcctcaagacttactttgccgaattctttgcttgcaaggactgcttccatttcaaaacgaggagcttgtttacctaccatacgttctgccatatgtatccctccaatttattgtttggcttaaaagtcgaaatagcttgaaaataaagggttattaaccatttttagttatattgcaatgccattatataaaagtagatttcctgagtcaatttttaacaaatcatgcatgtctttggcttcgacatttttgaataaaacgtttaacatggtcatgtacagggtaactagcctcaatgtgcagccatcaattagaaaaggagctcaacatggactttattaaacaatatgattgggcgggactaattacaaatgccggtgttctgctcattaaactcgccattatgatattgctctattttatcgttcgatcattaggcatgaaaatcattaaacatctgtttgcaaaattcgaggagcagaatagcttgtctataggacgtgcacatacgctccgaagcctgactcttaacatatttgcttatactttgatttttatattcttcgtcatggttctagatttgtttcattatgatccaagcgctcttttagcgggggcaggaatcgtcggcctggctgtcggatttggcgcccaagggcttgtcagtgacatcgtgacaggtttttttattttgcttgagaaacaattggatgtcggagactatattaccgtttccacctttgacggaattgtcgagcaggttggcttaagaacaactcaaatccgcagctttgacggaacattgcattacatccccaacagaaacatcacaaacgtgagtaatcattctcgtggtaccatgcaggctcttgttgatattaaagtgccggctgaaagaaacattgatgaaatgattcatattttacagcaggtttgtgatgagacggcagcggctcttccacaaataaaagaaggcccaaatgtcatcgggattcaagaactggggacttctgaaattgtgatcagggtcattgccaaaacagaaaatatggaacagtggcgagtcgaacgagtgttgagaaaagaaataaagaacgcgttcgaccgcgctttccctaaagaaacagaataaataaaagaaccgaagctttttgcttcggtttttatattactgaattctgctttcaacttcgctgcaaatttcttcagccgtcatcccggaagctgtaatgacaggtgcttgtgttaccgtatcggctatcccttgcacattattatcaagacctgttacgacacagcagtcacagccttgagcatcagcagggcttttcatcattacaacgtcatatcctttttcttttaaagcagcttctacatctgataacgattgttcaattccaatttttttagccatttttgaacacctccgtttactagagtgctcattttatggaattttattctttcatttgtgcttaattggcataaacagaaaaataacctgtcatgacattaaccgctgtttctatcgcattttcatcgggattcagcttagcgtgatgaagcccatgttcagaatcagcgccgagccagaacatgaagccgggatattttttcagcatatagccaaaatcctccccagtcattgcttcttttgcttcaattactgtcgccagttgatgttcagcaacaaaagacataaattcttctgttaatccgctcgtattgtaaacttggtgatagacagacggatatgtcacttttcctttgcagcggaatccgatttcgattcctttcaccacatcttcaatccgttcctttacctgtttcatcgattcttcagaaagcgtgcggattgtgccttccaggtgggccgtttccgcaatgatattttgtgccgagcctccggtaatggtaccaactgtaataacagcactgtctagcggatctgtgtttctagagataatcgtttgcagctgagtgacaagtgtacttgccgctacaaccatatcctcagccaaatgcggatatgccgcatgtccccctctgccttccagatcgatgactagctctgatgtattcgcaaatagaaggccgctttttgtcgcaatggtgcctaccggaagctctggagcaatatgaagcgcagtgatgaaatcaggctgccacttttttaatacatcgctctcaagcattggttccgcaccgccaggcccttcctctgccggctgaaatagaaaaagcaaatcatgtttgactgggtggtgaacaaaatgatcaataatgccgagtgcaatcgtcatatgcaaatcgtgaccgcaggcgtgcatgttgccgtgatgctctgatgcgaatggaagaccagtttgctcttctatagaaagcgcatcgatatccgctctgtacgccagcattttttccggcgccgtcccgttcacttttacaaaaagccctgttcgccatttctcaatttcaattctgtcttgcggatattgttccaagacatgtaataaatactgctgggttttgaactcctgaaatccaagctccggtatacgatgcagatctctgcgaattgcgatgagctcctctttcttcatttctattcctcctgcctatacgaataaggcgtggatatattatccacgccttttttatcaaacttttccttacagctggcgtaattcctgcttgatttcagttttgccttttgttttttcatcaatgtctttgatttttttagctggtgtgcctgcaacgacagtgtatggctcaacgtcgtttaccacgatcgctcccgcagcaacaacagctcctttacctactgttacaccttcaagcacaacagcatttgcgccgattacgacgtcgtcttcaattacaaccggtttagcggatggcggctcaataacgcccgcaagtacagaacccgcgccgatatggcagtttttcccgacagtagctcgtccgccaagcacaacgttcatatcaatcattgtgccttcgccgatgactgaaccgatattaatagaagcacccatcatgatgactgcgttatcaccgatttcaacttggtcgcggatgatcgcgcccggctcgatacgcgctttgatgtttttaagatcaagcattgggatcgcagaattgcggcggtcattttcaaccacatagtcttcgattttgctttggttttcttcgattgctgtttggatttcgctccactcaccgaaaacgacaccagtgtttccgttgataaaagctttcgcagattcgccgaaattgattccttccagctcacctttcacgtaaacctttacaggtgttgattttgtactattttgaataaatgaaataatttcatttgcgtccatcattttcatatgtatagtcctcctcctgattttctacctcattactgtatcaaaggaaagatacaaagacaagaaaaaaaggaacagccgttttagcagttcccagtgagtgatcagacagcgcatccgcttttctttgcgaattgtctcccaaagtttattaattcttcctcttcgtcaccttctggattattttcgatttttaccgaaggcagcacaatgtcgccaccgcattcttttatttttgattcgagcgtatcaaccgctccgcagaaaaattcatatgctgtatcaccagaaccgaatacagcgcatgttttaccggaaaaatcaatctcctccatgtcttcaacaagatctaaaaattcatcaggcagatctccgtctccccacgtgtaggttcccattatgacatggtcataatcggtaaacagctgggcatcatcaatatccattgcttcgaaacggtctacttctgcttccgcctcctgaagccccttttcaattaaatctgccattgcttcagtgttgcctgacattgttgcataaacaagcaaaatcttagccaattccttgttcctcctctaatgaatcattgctgaaacttcgtacggctggacaaatttacattcatacaagcctgcgcaaaagaaattctctttctgattggccactctccatccatgccccttaatggtatcgaaccattttaacgatcgggcttcgagatcagcctggtaaattctcgaaaaaccgttttcatcttgtgttgtagtgacatatataatgccatcatcctctgaaagatcaagaaatgattcttctattctgatcatgctggattgaatgatgaattcttcaccattcaaaagattccgtacggtgacagcaccgtgctttcctttcacagaacccatcgccgccaccagccaattttcattgaacacgagcatggatgccgtcatccggtttttttcttttttgacaacttggacagtgtcacgcttaatgtcgtaagcccaaatgccgccaaaatattcgtgtatttgcgtgccgataaaaagattgcccccgtgaaggcatagcgaccggataacagggggattatgaaattcggcaaaaggtttggctacgcgccatgagacaccaaaatcatccgatacataaatacaatgcttaccgtgggcgcagacaaacccgttgtttctgccggtaatcgcccacactgttgcatttgtcggaaagctcgacatcgtccaggttttcccttcatcagccgaacgaatgactgttcccttttcaccaacgccaaataagtaaggccctatgtagctgatacagtgtatcttacttttcaaacgaaaaagctttctccagccctgctccaaagaataatgaaaaatgccttctctttgtaccgccacaaaatatccagaaaacgccgatgccgtaacagcagttgctcctttatgaaacatggcttttttccttgttcatataatctgcccatgcaagaaaacctctcgcaaacgctcggcagctttccacatcttcatctgtttcaggcgctaattcaatttttagtgtttcctggtaaacagcagctcccgcctcttgcagcatgacattgaacaaattcaccgcttcgcaaaactttggataagaataatcgccagacccgaagcaggctgtttttaaaccattaagctgaagctgtttgacctcttcgaaaaaatcctccgcttcgtagggcaaatcgccgtccccccatgtataggtgccaatcagtacataatcataggaggttaaacaagacgcatccacatcatctatctcaacacaatcgatatccaactcatattcctgaagcgtatcttttattatgaaggcaatgtcttctgtatttcctgacatgctggcatatgtaatcaaggctttagccatgttatcaccccattaattgataatgattttcaatatcatatgtatcactttaaatgataatgattttcattgtcaacagataaataaaaaaagacagcacctcgctgtctttaaaatggattttcctgatccagcatatcctttatcacttgtacaaaagcttgaacttgtttcagttcaaaggcaggctcatagcctaataaccatgtatcccgaccgatcggatgccctttcatgtccaaaagaggcattttattcactttatcttcattttgaagggtaacagacggcaaaatagcataaccgattccgtgcagcgccatctgtttgcacgtttcaatctgatcaaccaatatcgtctgtttcggcgacgttttaaatttttgatgccaccagtgctgaatttcctgaaaataagtgctgtcacttttaaactggataaacggccgttctgtatgggcaatatcttcgatgcaggaaatttcagtatccactaaatacagatgatctgtcattaagtaatctttgcgccccttccactcagggttgcctcttataatgccgatatgaacctgatcctcatacaagcttttcagcatttcgctgctccacccggttatgagcgagatctttgcattcggatacttttccacatacgtcttcaggactttagggagccaatgctgaccgattatggaggcgacggcaagcttcaatgtgccgtgaatttcaccttcaagctcgtcaatattttctcttattctttcctgctctaatgtcacatcattcgcaaactgaatgattttctcaccggcgggcgttaccgttaatcctttttgggatcttaaaaagatttttgttccccacgccttttcaatggtttgtaagcgctgagataaagccggctgagatacaaaaagccgttctgccgcctttctcatatttaattcctcagctaaaactacgagcatatgaagctcttgaagctgcatgtcgtcctcctttttgttagcaataagtttttcttatctcccattctaataaaatcttagtttcttattcaagccctattctcgtttaaattatgtatgcgctttcttttttttgctctgctatataataaaaataggccgtacagcctacttattcaacgagcgtatatgcttattcaattcctttaaaacgactcttctcgtaaaaatcccttcaaatacctgctcgtcattttcaacacagacaaatccgttattaatgaccatgccgaatcccttcataatcggatcattgatatgaaggcgcggaatgtcggtcagcatgacttcctcaacagtgatttggtcaagcttttcaaactcaattcgctcaagtccaaaaatactgttcatgatcatatttgtcccgattaagccatgtaaacggtaggaaggatccagaaccgggatggctgtgtatccggtttttgtcaatactaataatgcgtgctcaaggttatttccgacttgcacgtgcgctactttgtccgcctcaatcataaattgtccgactgttgcctcaagaagttgatctgattgtaagcttatcatgttttcgaccccttttcattttcatcatcaatacattccctatattgcaataatataaactttatcagtatttgtcgaaaagtttcctttcaataaaaaagatactctttgtggagtatcaattatagggtgtcccattaattttcaaatcgaaatcggtcgtatagcgttacaagttttttgtaggtggttccgtcaacgtttttggtccctgtctctatatcgttgatctcactgcttaatagctcgatggcatactcatggttgatcaggatattcagcagaagtttttgttcttcttctgtaaatcgttcaccgataagactcattcgcaatcaggccccatgttttatactgaatacctctgaaagcaagacaacttactttcagctctaccgctagaataagtaatcagataacaaacgtcaaccgcataattcgacatttaccttggctttttcagccaaattattttgtgaaacgatttgcatagctgaaggcagtgtatgaatccggctttattttggcctcaatccccatggaggtaatacgtccagtcatttcctggatcagatcttttgtaagcccttttttcccaatatccaagtgaacttcaaaggtaagatccgccccctcaccggtaaagggcaggagcagatcggtaatatccattaagtgtccatcaagaatatgagcggccgtttcttggctgtacgccgtttctaacgaaatcttctcccgaaggctatgtatgggtctgtcgactgtatgatttttcaagcagccccaagctcccttgcctgtacgatgcaaatgcaatgcggtaataaactttgtgtaatcgcggtaaacctgtgaatcggttccgatcgataacacataagaagaacgggggtccttttgaacaaaggctttaagccgttccatcacatcttgaaaggtcatctgtgcttctgaaagattataaaacagaaaagaatcagccatcacgacactccttttcaaggatttacaaccatgaaacaagtatgttccttaccgtttatttcgattacttttgcaaaggcggaagcttgttccccctatttcaggaatcttactgaagaagttcaaagatttcgatggaaaccatgtcgatattatcaaacggatatgtgttaggtttttcacccttttggaaaaccgtcagttcaaacgtttgatttttttcgaaatatttaacactgcatattttctcaccattcacttcgaaatagcgctgcattggctcgttagccgcttccgctgtttcttgcagactttgcagccgtgtgatgatacccattaattgtgacattctaaaaaaagactcctttcaaaaagcaacttcaaatcaacaagtatttattataatacaagttctattgagcatcataccataaagtcggacaggatggcattttcactgctgaatttaagcaaagaaaaaaagtgaaaaaaactatttttctttagtttgaggctttttttgaatgtcatgcacacaattataatttttttcgaatctttggcagcattaagaatgcctttttgcaactttgtcaaaaccttcttttgaattttatggtgaagtcccgcgtggccataatcaatgggagtcatgctggatagaggtaaacaacggaactgaaataaacatttcagaacgaattttcctcctcacccgtgcagcagtgtcaggggtgttcggcactgaatgtttctccccgtgttaaacgtttaccactagttaggtttattgtttcattggattgtcctatgctttgacaaataaaaaacttggcgggggtagcgccaagttttttcggatcttgatctgatagaggggttggggaacagagagtagcttctctctataattaaatgataatgattctcagtatcaatgtcaatcgttttttgatatttttttcaattcataaaaaaaaacggcctttcagccgttaaatcagtccgtcctgctcatataaataagaataaggcaagtctataaataaatacatctgatcatccatcggatatgaaaacgttctgatcatttcacctgtttctaaatcactgtacagatcactgaaaaaaccttttctgagatttctcattctcataatgttctccagaaaataagggcgccagctccagttcttttccgcatattccggctgataaatccattctccatcttgcttaaacacatttcccgtcagctgatcgccttcttcatcacacatgtaaatcctgaagctgcaatctgtcagctcttccgccagctttttaataaagtcatcatcagaagacagattgttttttctcaaagaggtcacagcctgatgcactcgtttgtaaaactgttcagagtgctcatagacggtctccagtttctttttctcatgtgtgataaattggtgaaattcagttttaagtctttgtttcaatacatctctctctagaaacgtttcagatggagacaccaagtaatagccctgaaaataacggcctccgtttctccaggcgtactgaagctggaagttcgcctcaatgtcttcatacaatagcgccgcaccgatttttcttgctaataaagatatgctgtacagcacatgctcatatgacggtgacggctgtgacactttcagcgcctgcaaatcgatttttaacagatctggtgagagcagcgcgattctgtccaagttgctgctttcttttccgatgttgtcaactgcgattttaattccgtatgtacgatagtatgcaagcatatggtagagctgctcaatatccccttcaaaattgtgctctgtaatttcaagcacaaaacggtggagttcgattcccttcgcttcatattctttcagaagctccagaaagctttcaccatgatccagcatcagcagattggcatcctgattcataaaaatcagcagatcagaatccgcctctaaaaagcggtctagagcctggcggataattctgttatcaacctctagtttatattcttcgggtatccccgcatctaaaaagaagggcccgagactttggatttctgaatctgccaaaattcgtccaagcacctcatatccgacaaccttctgttcctcggcactgaaaatcgcctggtaatatggaaggacatcatcaatgttcgttaaaatatcaagtggatccaacatgttatcacctgcttctctatctttgtctgattataccacattgaatccaaagattaatattctttaaaacggataaggattcagccattgccccccgtccattgtgatacaatccccgtttatataggatgcttcatcagaaagcaaaaacgctgccaaagcggcgatttcctccggtgtgcccaatcggccgagcggcacactgttcatcgtgcgggccatcgctttttccgattcaaatagcttctccgcaccgcctgttcgttcaatcggtccgggggctatcgcgtttgtgcgaatgccgtatttgctcccccattcaacggccagcgttcttgtcaatgacaatacccccgctttggctgcagcggaatgaacgacccccgctcccgctccccaagcgtacgtggctgccatatttaaaatgacaccctgctgcttctggtcaatccaatgccttgccgctgcctggctgcaaaaaaatgtgccgtttaaaacaatctcaataacggctttccatccattgggcgtcagcttttctgccggacaaataaagtttccggccgcgttgttaatcagcgcgtcaagccggccaaaggcttttatcgcttctttaatcatgtctgaagcggcggaatcggaacggacatccatttgaaaacatgcgacctgtccctcaaaggtctgaatttctttttttgtttcctcaagtgcttcatggttcctccctgtcaccataacgtgccaccctaattcagcctgtttttttgccatcgcttttcccatgccgcttgacccgccggtaataattaccgcctttttttccatgtttatccctccaattgtgaatgagtattcattcaataatattctatcattatatccctgcctctgtcagcacatgctcatatgagatttttatcagatacagatgatataatagaaaaactctattaaaggttggtttgaaatgaaaaagatgtccagaagacaatttctaaaaggaatgttcggcgctcttgctgccggggctttaacggccggcgggggatatggctatgccaggtatctcgagccgcatatgatcgagacaaccgaacacacaataaaaagctctctcattccgcacggatttgacggttttaaaatcgtgcagttcagcgatgcacacttgagtgattactttactctcgaagatttaaaaactgtcatccttacaattaatgaatctaaacctgatctcattgtttttacaggtgatattatcgataatcctgatacgtaccagcaccaccaggcagtcattccattattgagaaagcttaatgctcccttcggcaagctttgtatttacggcaatcatgatcacggaggctatggaactgccgtttacaaaagcctgatgacggccggaggtttcacggtatatcgcaatggctatcaaacattgtcactcgcagatggcagcaaaatcgaaattgcttcgcttgatgacttaatgctgggaaacccagattatgaaggcaccctttcaaggctgagcgacagacttttttccattcttctcgtccatgaacctgatgcggccttgaaaacaacagattatcccgtgaaccttcagctttccggccatacacacggcggccagattcagctgcctttttacggaccgattattacgcctccatatggaaaagtctacacagagggaatgtatcaaacgggcagcactcatatttacgtaaaccgaggcctcgggatgaccaggctgcctttgcggtttctggccaagcctgaaatcactgtcttcaccttaaaaagcacaaattaatgtagcaggatgggctcctcatcaatacttataagtaaaaaaggaggatgaggaaactgcttacgtaccaggtgaagcaaggtgatacactgaacagcatcgcggctgatttcagaatcagcacggctgcattactccaggctaatccgtcactgcaggcagggctcacagcgggacagtccatagtcatccccggactgccggacccttatacaattccgtatcatatcgcagtctcaatcggagcgaagacccttacgctgttcctaaataatcgggtaatgaaaacctatcccatcgccgttggtaaaatactaacgcaaacgcctactggcgagttttacattattaaccgccagcgcaatcccggcggcccatttggcgcttattggctgagcctttcaaagcagcactacggaatacacgggacgaataatcccgcttcgattggtaaggctgtttctaaaggctgcattcgcatgcataacaaagacgtgattgaacttgcttcaattgtgccaaacggaacaagagtcacgattaaccggtaatgttttcttatttgtttcaaaaacaggcggtttataatatgataaagtgggacctttagggtaaggagcgtttttatggatatatttaaaaatcgtaattttgttcgtctatttttcgcagcactcgcttctcaaatgggcacgacagtaggcaacatggcctttgctttttttttgctggaccgattcagcagccagccttcatatacgaccttggcggagctgatgtattctcttccgaccatatttgtatttctgatcgtgggagtcgtcgcggaccggtttgacagaaaaaaggtggcagaaaattgtgattggatcagagcaggcctgactgtcgtgctttttttcactttatttaccggcaatattcctcttgttttttgtatcttatttatcagaagcgctgtaacaaagtttttctttccggcagaaaacagtttggtacaagccattctgccgaaggagcattattcgaaagcggcagggcttaatcagatgctttttagcatttttatggtgtttggagtcggtataggcgcgtttatgtacaacacaatcggtattgaaggcgccattattcttgattttgtcagctttatcatttccgggctgctgatccgcagctgccggattccaaaagaagcccgacagccaaacggtgcattcagctggagaaagacttctgttaaggattcaataaatgactttagagaaggcattctctatattttaaaaaacaaattgctggcatctcttattttcggcttcttcatttttggatttgtcaacggaggattcgccgtattgccgatgtttacaatgaaatatggattggcgcctgaccgttatgagtggcatacgtctgtatttacgatcgcactcgggtttgggctgctggcaggcagcgtaatcggcacgatcatctctaaaaaagtgaagccgcactttttaatgtcgataccgattttcattgcaggtttgctgatcttcgtcctcggctacaccaatattttatgggtgtattacgcggcagcttttgcactgggaatgtgcatcggaccgatcaacattgcaatcggaggctggatgcccaaaattgttcatccaaaactgatggggcgtgtaagcggcatgcaggacccttttatgatgtttgcacagtctttgacactcggcttagttgcgctgttattccctaagttcgtttcaaacattgattatctttattacggcatgggtgttatcatcctgatcgtttttattttttattttattgcactgccaaaatacagtgcccaggctgtggaagtgaatgttcaggaagcatttcaagaacagccgaaaaagaaggcaagatctgtataatgcaggttaaaaatgcgctttttttcttagaaaaaagcgcatttttacattcaatatttgcatttcaactttaaaaaagtataatctaaacatatagaaattgataagagcaaaggagagaaataatggacgaccatgcatatacgaaagatctgcagccaaccgtagaaaatctttcaaaagcagtttacactgtgaaccgccatgcaaaaaccgcccccaaccctaaatacctatatctgctgaaaaaacgggctttgcaaaagcttgtcaaagaaggtaaaggaaagaaaatagggcttcatttttcaaaaaatccaaggttcagccaacagcaatcggacgtgcttatctcaatcggagactactattttcacatgcctccaactaaagaagacttcgaacatcttccgcatttaggtacacttaatcaatcgtaccgaaatcctaaagctcaaatgtctttaacaaaagcgaaacacctattgcaagaatatgtcggcatgaaagaaaagccgctagtgccaaatcgccagcagccagcttaccataaaccggtctttaaaaaacttggcgagagttacttttaaaataaaaacagccgtgcctctttctggcaacggctgtttttatttattcaataacatacgtatccacttttttaatcaaatcactgatctcaggcttgctgatttgctcatctgcgcctacaacttcgccgcggtgacgcagatcatccgtaattaacgatgagaaaatcataactggcacatctgagcttttcggattttccttcagcagctttgtgagcctgtgtccgtccatttttggcatttcaatatcagtgatgatcatatcaatctgttctgataaatcagtttcgttttcagcaaggttcataatgtattcatatgcctcttttccattttcaaacgaagcgatattgttgtaccctgcttcttttaattcatcctgcaagaggcgcatcaaaagcggtgagtcctctacaatgataagctttttatcagttcttctttcatcgaagccctcggtatgcatattatacgtgtcaacacctgaatctgattcaatgtcataaataattttttcatagtcaggtaaaaagatcatcaggtcttcgagcttaataatcccggtaaggtgccgctccattccttgatttaacgatgtcggcttttcaatcgcttcccaggatactctgtgaatttgagaaacagagccgacatgaaaaacaattttccgtttattaaattcagtcacgatatatttctcatcttttgatccttcaggctctactccaaaaaatgagaagagactgatcacagggaggatttctcctctgagtttaatcattccttctacatgctgatgggagtgaggcactgatgtcacctcgacaggctgaataatttctcttaccttcatgacgttaattccgaaagcattttcacccacgccaaacttcacaatttctaattcatttgtaccagaatccaataaaatttcgtattgttgtaacgacaattcaatccctcgctattcgcattcagtattgtactgtatatatcggcgtaatttgtaaaaagtgaatggcagctcttcaaaatcgaattccgaaggcaacaagccgtgttcctcaaaaaagaaacttttttcctaataaccattgactttccaactaacagtgataaaatagtcaaggatttttccaaagaagggtgtaaataatgggtaccttagtaatatttaaagaaaacgaaatgactgttttagaggatatcagtgaagaaacttacctgaatatgaagaaagaatcagctgaccttcaagaagagcatcctccgtatctgatttggcacgaagaccttcattttgattatggctattaatgaaattggcacatataaacaataatagaacatgatacaataaagacaatcaaatcgctggttgtcttctttttttctgaaaagaaaggtatgtttagaaaaaaggcgcatacaatcgaaatatatcagttaaaaaggtgacaaatgatcagctagtggtaaaataggataaactcattatatttgttaaggtgatgaattatggaacatttgctgaatccgaaagcaagagagatcgaaatttcaggaatacgcagattctcgaatcttgtagcccaacacgaagacgtcatttcacttacaatcggccagcctgattttttcacaccgcatcatgtgaaagctgccgcaaaaaaagccattgatgaaaacgtgacgtcatatactccgaatgccggctacctggagctgagacaagctgtgcagctttatatgaagaaaaaagcggatttcaactatgatgctgaatctgaaattatcatcacaacaggcgcaagccaagccattgatgctgcattccggacgattttatctcccggtgatgaagtcattatgccagggcctatttatccaggctatgaacctattatcaatttgtgcggggccaagcctgtcattgttgatactacgtcacacggctttaagcttaccgcccggctgattgaagacgctctgacacccaacaccaagtgtgtcgtgcttccttatccgtcaaatcctaccggcgtgactttatctgaagaagaactgaaaagcattgcagcccttttaaaaggcagaaatgtcttcgtattgtccgatgaaatatacagtgaattaacatatgacagaccgcattactccatcgcaaaccatttgcgggatcaaacaattgtcattaacggcttgtcaaaatcacacagcatgaccggttggagaattggatttttatttgcaccgaaagacattgcaaagcacattttaaaggttcatcaatacaatgtatcgtgcgcctcatccatttctcaaaaagccgcgcttgaagctgtcacaaacggctttgacgatgcattgattatgagagaacaatacaaaaaacgtctcgactatgtttatgaccgtcttgtttccatgggacttgacgtagttaaaccgtccggtgcgttttatatcttcccttctattaaatcatttggaatgacttcatttgattttagtatggctcttttggaagacgctggtgtggcactcgtgccgggcagctcattctcaacatatggtgaaggatatgtaaggctgtcttttgcatgctcaatggacacgctgagagaaggcctggaccgtttagaattatttgtattaaaaaaacgtgaagcaatgcagacgataaacaacggcgtttaagccgttgttttattttttggaaatgaaattttaaacgctgtgcctttttcaggatggctgtccacatgtataactccctgatggttttcaatgatattaaatgtcaccattaatccaagccccgtacctttttcttttgttgttaaaaatggctctccaatccggtttagtaccttttcaggtataccttccccttcgtctttgacagtaacatgaacagaatgctcatcttcggttatgataatgtctactgttcccccatcaggcattgattcaactgcatttttgattaaattaatgaatacctgctttaattggttttgatccccgtttatataaatgctgtctttttcataacttgttctgataaaaatgccatttaaattcgcctgcgtttctaacagggctgaaacctcaccaattaattttttcaagttcaaatattctttgacagcattttgctgaggtttcgccagcatgagcaattcactgagtattaattcgatacggctgagttcagaaaacacaatatcaaagtaatgttcgttgccttccattgtcggtttcatcagctgtaaaaatcctttgatcgctgtaagagggttgcggatctcatgggcgattcccgccgcgagctgccctgcgattgataatttttccgatttcagcatcaattcttctgtttgttttctctctgagatatcccgaagaatgacctggacggccgcttcaccaaaaaaggtcgtcggaatgcagaccatctccgtatagatgaccctgttctgaaaggtgaaccaggattgcttgacaatttcagattctgttttttgctcggcgatgttttggattctctcttttacatcctcgtgatcgcaaggatgcagctgatcgtatatgtttttgccaattaaatcctcatatgtagccgcttcaaacagggaaattcccgattcattcataaacacccattttccattgtgaatcaccgcaatggtatcaatggaattttgaatcagcagctgatatcgttcacggcttttttgcaggatggtttggaattttttccttgaagagatatcgatcagcagcagcagctcagcctgctggtttttgtagacggtcggggatgctttcacttctaaatgaacaggtgtgccatcaagccttttccacgtctgttcaatcattccgacttccattcctttttgcattcgtataatcctgtttttcacgatatcatgatattcttcttcaataaattcataggaccatttaccaataatagcatccttgctttttgctcccagcattgagagcatcgcgctgtttacatagacgatcttgcctttgacactgatgcatagcggactcgggagattttcaaccaaccgttcataatcatccgttatatatgtagtcgattccgggcttgcaggttcgatttcatgtttttcgcagtttagggattgatggcctgtttcttcttcaagaaccttcattttcaaaatgatttcccgttctgtccgctcagctcttgtcgtaacaatttctaccgcagcctccacccacacaatcgtatgatcttttttaataaaacgaaaggtgcacggcatcagatgatgttcattataaaaatagctttcaaccaaaaattggtcttcctcatgcagaaacgttttgaggaatgatccgatcatctctccttggagatagcccaaatgcagtttggagttggcagatatataaatgatgcgtccattagaggccaagactgcatgaatatcggtttttgtttgaagtggtttaacatgctgcgtatcctgttccacagaatccctcctttgcatgatcatcgtgtttcgacatatacagattgacttttacctagtatgattcgctagaaaatgagtattctccttctattcttatggtgaacgtcaatttttgaataaaagaaagggcacacaatcttttagttgtgcaccctgttttttattttttactgtgttttttttcgagctctgcgtaggcgtggatagctcttttggcaataattttattgatcttatcatcatcatttactgatggaacaacaacactaaaagccacttttggatttttcgatgggtaatagccgacaaaagtcagattgtatgtttttttcccccaccagttgcgattcgtgccgtagtaaaatgtttccgctgttcccgttttccctgatacatcttctgtaaacgtatttttagctgtccctgaggtggtaactagcttcattccggtcttcacctgctgaatgtcactttctgagttgttaattttgttgagaatgtttggctttctttgttcaatggtcttcccaaggccttcttttttgctgggctcatggatacttgtaacaattcttggctgaacacggtagcccccattggcaattgatgagatgtactgtgccatttgaagcggtgtatatgtatcgtattgtccaatggccaagtctaaaattaacccccctaccgcatcaggtgtagtttgcataccggctgattcctgcggcagatcgatacctgtctttactcccaggccaaattggctgtagtaatttctcattttgtttaaatccttctggtcagcaggaagaggtccatacggcttgtatgtgacaccggcaatgtgcatggcaacattaaacatatatacgtttgaacttttttgcagagcggttaattcattgatggttcccatgttcatgtaggatttcttcggtttgttaccgtatcctgctaaataaagaggtgtatcaacaaaatatttataatgcgggatcccgtcctgatagccggctagcacggtggccccctttactgctgatcccatttcatattgggtggtaaatgcccctatcgcataatcttcaattttgttggtttttaaatctatctttttccctgccatcgataaaatatcgccgttattcgggtccatcatcacgacaaaggctctgtcaagcatgtaatttccgcgtgcacggctgtttcttacttcttcttcaatgatcttttctacctttgcctgaagctccatgtcaaaagaaagctgaagatcgtatcccctgctgcctttatcaatggttttttggctgacgacatttcctttattatcttctacgtattccactttttctttatgcgaatttaaatattcttcatattgatactctaaataactttttcccaccctgtcattattcgcatagcctcttgttaagtagaaatctttccggtcgctcagcaggccctgatcaggtgtcgtgacgcccccgaaaacagaataaagggttttgtcataaggatattttcgtgtccaatcgtttacgatatcgattcccggaagttcttctaaatgctcagaaacaatggaaatttcatcatatgttaagtcattttttggtctttgcgaggagtttttcttctcatcaagcagcgctccgttttttccattgctattgctcttatttggattcattgcctttacgatttgaggttcgtaagcatttccgcttgaaaaccttgtatatatcgcagcagtttccatttcttcgtcatcttgctgaatagcctttaattcttgatccggaacacgctctatttgaagcttgtaagcctggtctcctttcagattgctttctgattccttaagcagagcggcggcttttttcggatgagctgcgacccagtaatcacgaagatccctttccttcaaaaattcggtatcaatatgaatgaaagaagcaagccgcttcgctgttttgattttatcttctgtttttgtgctagatgttgatacatacacaatttctggaacgctctggttgtcgacagcaactttctgatttctgtcgtacatcttcccgcgaggcgcaggatagtaagctgtttttgcatttgatttctcagcgtcttcttcatgctgttcgccttcaacaatttgaacaaccccgagcttaaaaattaatgcagtgaatagaacaaagacagctaggaaaaaaaggttcattctgattgctctgtttcctttgctctttttctttggttcacgtcctatttcagtcacttctggttacccctctcaaatcattcaatatatttacatatactgagattaattgtaacatctttgtaatagttgttacagcgaaaaggagtaaaaaaagctgtcaatataaaaacacattaaaatataactaacggttcaaaaaaaaggaagctatgtaacggtacgataaaatcatatataccgctgattcccttattcttagtgattcaacggatttactttacgaaaatgacaatctttatttgtcaaaggaaagtgctggaatctttatgacaaaaaagctatgttatgatttttctgtagaaacaaacaactctaggaggttacgaactaatgaagaaagcatttattttatctgctgccgctgcggttggattattcacattcgggggcgtacagcaagcatcagcgaaagaactctcctgccagcctgtggttacagtaaaaacggggaacacagtacaaaacatgtcacttaacgatgcagtgaaaaaactgcatattaacacaaatatcaaaacgttaaacgctgcaaacgaaaaagagattaagcagtttcttcaaaaacatgcgaagcaatctaacgtgaaagttcaggatgttcaaaagacagaaacggccaaacctgcacaaaagactactgaaaaagcagctgctgatcaaaacactgcttctaaagcacccgcaactgctgaaaaaacaaacacaacaacatctgcaccttcatctgtaagtgcatacgagaaaaaagttgttgaacttacaaatgcagaaagacaaaaacaaggattaaagccgcttcaaattgatgaaacgttaagcaaatctgcacgagcaaaatctcaggatatgaaggacaaaaactactttgatcaccaaagcccaacatacggctcaccgtttgatatgatgaaatctttcggaatcagctacaaaacagcaggtgaaaacattgcgaagggccaaaagacaccagaagaagtagtaaaagcttggatgaacagtgaaggacacagaaaaaacattctaaaccctaactttactcacatcggtgttggctacgttgagtctggaagcatctggacacaacaattcatcggaaaataataaaaaaagattgcctgtttcgtacaggcaatctttttttatttcacccaaagcttatatatactctgtgttccgctgttttcttcaccttgagcagctagcttgtcatataaggattttgcgagcgacaagcctggcatttcttcccccattaattctgcttcctctagtgcaattcccatatccttaataaaatgcttcacataaaatcccggttcaaagttgccttgcagcatacggggagcaagatttgacaatgaccagcttccggctgcgcccgttgtgatgcttttcagaacattttctggctctagacctgatttttgggcataagccatcgcttcagcaacaccgatcataccggctgcaattgcaatctgattgcacatcttggtatgctgtccgcttccagccgatccttgatactgaatattctctcccattaaagagaaaatcggcatgcaggcttcaaaagcttctttttctccaccgaccataatcgcgagtgttccgttttgtgcaccgacgtctccaccggaaacaggagcgtctaaagcgaacaatgctttttctttggccgcttcagcaatcttcttcgcaagcgaaggcttagatgtcgtcatatcaataagatatgcgccttcttttgcgttttcaataattccattgcttccgaaatacacttcttcaacatcactgggatagccgaccattgtaatgatgacatccgcttctttcgaaagatctttgaccgtatctttccagatcgcgcctttttgaagtatgctttctgctttttcttttgtccgggtgtacaccaaaacagggtggccgtcattcagaatatgtgatgccatgctctttcccatcactccaagaccgataaaaccaattgtttttttcaaggtcattcctccctgatgtttcgttttgattttagttaaaatttatcatttttccttcattttttagactaccatatctattcatcttataacataaaaaatccccaaaacaaatgatgtttggggatgtaattggattacaatgtgaattttgcaattgtgttcataagttcttggcttgcatgttttagtgtttccgttgagtgtttgactttatcaagggtgacaagctgttcatcggttgatgcgttcacttcctctgctgcggcagctgattcctgtgatatggctgaaatgctttgaatagcttcagaaatcgcaagctgttcttcactcattctttgaatttccgcgtaaatgtgatcaataccttgtaccagtgactgcatttctgcagttatcgtatttaatacctctccagtttcgtgaatggcactgttttgttcatcattcattctgcttgcctcaaccatcgcgtgagaggcctcttttgtctcaagctggataagcttcacagtctcgctgatatgctttgtagaaagggctgattgctcagctaacttccgcacttcatcggctacgacggcaaaaccgcgcccgctttctccggctctggctgcctcaatactggcatttaaggcaagcaagttggtttgatcagatatgtttgaaatcgctgtaacgacttcttcaatattcttagtttgattttccaaatccagcagcatcgtttcaacctttttcgtttccatattggcttcgtttgatttcatcagcagctggccgagcgcgtcaagtcctttatagcttgcatcctcggacgattttgaacgttctttaattccgcctgcctcctcagcgatttgcctgattttcgttgacaggctttccgatttttcattaatggtttcaacttcagaagcctgttccgatgctcctgcggctacttcttcaatcgcttttgcaatttgtccgcttgtttcattagtttcggcagagacagccgttagttgttcagaggtgtcagatactttccctgaagagagtctcacttgctcaaccatttccttcatattttcaaccatcagattgaaatctcttgttaaaataccgacttcatccttagattttgattccgcgcgcactgttaaatcgcctgcggaaacagctttcgtttttgcgatcagctgctgtatcggaccggttatcgttttggccaggaagtagctgagaataattgttatgataagcgcaagcaatgatatccaaagatttgcccgattcattttatctgaaatccacattaattgatcggtatcaaattgcgttccgaccttccagcccgtttcgccaatcgtttggtacacaaccatttttccattcacatcttgtatcccttttttctcggatgcgatggtttgcagtgtttgatcctttgatatattttttccttgatttgacggatgggctaaaagattgccgctcgtatcagctaaaaaggcaaatccattgtaaggcaccttttgtttattgaccatactctggatagcagagagtttcaagtcatagctggcaacccctatcactttttgcccgtctaagatcgctttcgatgcagtaacaatcatgtctcctgtcacgacatctttataaggttccgtccaaacaacttgatccggggtttcagctgcaagcttataccatggtcttgatgctggatcataatcctcagcgaaatccgcttttggatatgtaaacatttctttttttgcggtgcctatgtaagccatcgcaacataatcatcgttatctttgatttgcttaatgtcatcgtgaaacagccgagcaacttctttacttggtttcgttacaaatgtatgcgttaattccccattagccaatcttgataacgaaatggcataactctttaattgcaattcaatattttgttcaagtgactgcgtcacgttttgagttgtatttttcccatcctctgtaatcatcggttttagcgtcaaataagaagacagcattaaaagaacaactgtgacgattaacataatcgaaacaaaaacagcaatcttcatgtgaagttttttaaacaaaccaatcccctcctaatttctatatcggccctttcgtttgaaaaatgaataatcaaaaaataaattataagaaaatcggaatatatttactgaaaattcaatcttcgttataatgaaacaacataaggagagtgatgatcatactaaaacaaatgtatgtgcgcgacagcagaaaatttgaggctctgaccatcagaaactacactgagactgacatcgagaggctgatttctcttcaagaagaatgtttccctcctccgtttccccaggaattgctgtggtcagaggaccagcttgtcagccatatcaaaacctttccggaaggcgctttatgcgcgctcatcaatggcagaattatcggttccatgactgctcttattgtacaatttgagcctgaatctcctgatcatacttgggcacaagcaacagacaacggatcgattaaaaatcatgaacctcatggaaatactttatatgtagtggatatttctgtttctcctcattatcgaaagcttggaatcggaaaatggctgatgaatacgatgtatgagctgactgttgataagagactggagcgccttctcggcggcggccgcattcctttatatcataaatacgcacacgagatcagcgctgttcagtacgttgaagatgtgatggaaggcaggaaaaacgaccctgtactgtcctttctcctccgttgcgggcgttcacctattcgtgtagtaagcaattatgtagaggataaagaatcattgaattacggcgttttgatggaatggaaaaatcctttttataaaaagagagctgttgatcacaacagcccgtttaagtgaaatattcaattttcgcgttagggaaaaaggtatcaatataggattcaagtgcttctcgaagtgcatgctcttcatctttctgatatatatattttccgatcccgtagcgtccccatttataacggcgcttttcttcatctaattcgagcttcgtcttcggataatttttctctatcactcgtttggccggttttgtaaaacggtgttgaattaattcaaacgttatgtcatgtctaacgtcctgcggcaaagcagcatcaagcttttcaaacagatgtctgtatccttcttcccagccttcatgaatataaatcggagcaacaataaagcctagcgggtagcctgcttttgcaacttttactgccgcctctatccgcttatcaagaggtgaagttcccggctcaaagtttttaatcacatagtcggcattaatactgaatctgaatctcgttttcccgttatgctttgcgtctaataggtgatcgacatgatgaaatttcgttacaaatcggagctttccgagatcactttgaccaaaatgttcaatggcgcgcttcagcgtgtgtgtcagatgatcaattcctacaatgtctgacgtacatgatgcttcgaaccttgtgaactctggtgcgcgctccttcatatacttatctgcctgatccaaaatctcttcgacgtttacataagttctgatatacggctttgatcccatggttgtttgcaggtagcagtaatgacaatgccccatgcagcctgttgcaaacggaatggcatattcagccgagggtttggatgaatcaaactttaatgttttccggacaccgataactaaagttgatttcgcattgcgatattgctgaagatgatttttcccaggaatattacgcacctgattgtgggatgttgtttctctgatttcaatgcccatattctcaaatttttcttgtaattcttggcctagcggatattccagcgccctcggttctatatatacaagctgcggaacaaatgggttctgcatgatgccacatccttttcctttactaacgttacttttctcactaggcggaaaggatatgagttgtaatgatttccttgttactcatatggatcaatatcaaagagttctttgtaaagcgatttagcttcttcatagcttgcaaacacagcatcgtcctctgcgaacgggtgataggtttcataaataaacagggaaagctctccttcatggtatggatggtgcacaatttcggcttcctttatgtgagctacattggcggcgtgcggatttctgtagatcacataaacagtatctcctgcgttaaattggtttgacatactatccctcctagccatgttattgtgtccttctatacccttacttatgaaaaaaaccagacaggccggaggccgtctggtttttgtacattacttgaatgtttcttttacgaacgcgacaacttcttctgtcgtgctcatagataagattttctctttgaatgactcagcttcttgtttagacaatttgctgatttgtgttcttgccggaaggatagacgttgcgctcattgagaactcatctaagcctaagccgagaaggattggaatcgcaatctcgtctcctgccatttctccgcacatgccaacccattttccttctttgtgtgctgcttcaattaccagtgtaattaagcgaaggattgccgggttgtatggctgatacaggtaagatacacgttcattcatacggtcagctgccattgtgtattggatcaaatcgtttgttccgatactgaagaaatcaacctctttagcaaactgatcagcgatgactgcagttgacggaatctcaaccatcattccgacttcaatatcgtcagatacagcctgtcccgcttttacgagcttttctttctcttcaagaaggatcgcttttgcttctttgaattcgttaactgtcgcaatcatagggaacatgattttcaagtttccgtatgtacttgcacgaagcagcgcgcgaagctgtgttctgaagatttcttgctcttcaaggcaaagacgaatcgctctatatcccaggaacgggttcatttctttaggaagctgcaggtaaggaagctctttgtctccgccgatatcaagtgtccgcacgacgactgattttccttccatacgctcaagaaccgttttgtaagcatcaaactgctcatcttctgtaggcagctgatctcttcccatgtaaaggaattctgtacggtaaaggccaactgcttctccgccgttttcaagaacaccttttacatcatcaggagtaccgatgttcgctgcaagctctacatgatgtccatcttttgagacagtcggttcattgacaagcttcgcccactcagctttttgagccaaataagcattatgtttttcttcatactcttttacagtttccgcagatgggtcaataatgacatcgccattgataccgtcaacgataacagtcacgccgttttggatcgtgcctgtagccgctttcgttccaacaactgctggaatctcaagagaacgtgccatgatggcagagtgagatgtgcgtccgccgatatcagtagtgaatccttttacgaactcacggtttaattgggctgtgtcagacggtgttaagtcttcagctacaataataacctcttctgagatcatgcttgggtttggaatttcaacgccaagcaggtggccggttacgcgttttgttacatcgcggatatctgccgcacgctctttcatatattcgttgtccatagattcaaacatggtaacgaacatagaagacgtttcttttaaagcgaattcagcgttcactgaatcagtgctgattttttctttcacagggttcagaagctcagggtcactgagaactaaaaggtgagcagaaaaaatatcagctttatcctgacccagttctttcaaagcgtgctctttgattttttcgagctcttcttttgaacgtgcaatcgcttcatcaaaacggcttacttccgcttcagaatcagagatgtttttcttttcaaccgttaaatctggctcttcaagccggtatgcttttgcaatcgcgatgccggctgaagcaccaatcccttttaattcttgcattactcgccgagtccttcgcttttcattgtttcttctaaagcgttaagagcatcgttttcgtcagctccggaagcagagattgtgatctcagcgcctttagcgatacctaaagacataacacccataatagatttaaggttaactgttttgccgttatattctaaattaacgtcagcgtcgtatttgctagcagtttgtacaagaactgtcgcaggacgagcatggattccagaatctgcagttactttaaatgttttttgtgccatttttatcattctccttttaacttaaagcttaattacttcacaatattatatcatacaaccgtacttgtcatctgacaagcacggcgtactaacacccttatttttcaatcttcacaatatcttcttgttctctgttgactgaaccgcttgctttaatgctgactgtttctccttcagcaaggtttgtaaatacaatcggtgtcatgagagatggtacattcggtttgactgcatccagatcaacttcaagaagtttttgtccaggctcaacgcggtctccttctgatacgaaagacgtaaatccttcgcccttcaggctgacggtatcaataccaaagtggattaaaatttctcttccgccgtcggattgcaggccgatcgcatgtttcgtcgggaacacattgagaatttttccgcgaaccggtgatacgacaattccttcagaagggagaatcgcaaaaccgtcacccatcattttccctgagaagacttggtcaggaacatccgtaatcgggtgaatttccccgctaatcggagaaacgacaacttcctcgccgatttcattttgcagcggttctgcaatcacttcctcaacctgctgtcctacttcctcttgagcagatgttttcggttcaggtctaggcttgcgtcccgcaataatgtcttgcatttgtgtttttaacccgtcagaacgcggtccgaaaatagcctgaatgttgttgccgacttccagcactccggaagcgccaagctgtttcagacggtctttatcaacctttttctgatcgtttacagtcacacgcagacgagtgatacaagcatcaaggtgtttgatgttttcctggtcacccattgcctgcagaatctcataaggaagatcccctgcttcacctgttttcccaggtgctgctgtttcttccgcagcatcctcgcgtccaggtgttttcagattaaatttgcggatggcaaatcggaatccgaagtagtaaatgaccgctaaccctaagccgacagggatgacaagccaccatgccgtccggttcggtaaaataccgaataggaagtagtcaattaaaccaccggagaatgtcataccaatcttaacattcaacagctgcatgaccatgaatgaaagtcccgcaaacaaacagtgaatcgcaaacaggactggagcaacgaataagaaagaaaattccaatggctctgtgatccccgttaagaaggatgtcaaggccgctgaacccataatacctgcaacaagttttttgttttgcggttttgcttcatgataaatggcaagcgccgcagcaggcagaccgaacatcataaatggatatttacctgtcatgaacgtacctgccgttaactgtacgccgtctttaatctgcgccataaagatacgctgatccccgcggatgatttctcctgcagcactcttatagctgaagaattcataccagaacggtgaatagaaaatgtggtgcaatccgaatgggataagcgaacgttcaatcaccccgaagataaatgcagcaagggttggattcgcttccactaatcctgttgaaaaggcattcaatccatgctggatcggaggccagatcactaacataataagacccagaatcagtgcagaaattgacgtaacaattggaacgaaacgtttacccgcaaagaaaccaaggtattgcggcagttcaattgtgtaaaatctgttaaacaataatgcagctaacacaccgacgataataccgccgaacacccctgtcgccaaggtaggtataccaagcatgtttacatatgcaggatggttttccgtaaagaacttggctctttcaactgaatccgaaggaatggttccgtttgcaagaagaaccgcactcatggatacattcattacaagataaccgataattgctgcaatccctgcaactccatcaccgttggcaagcccgatggctacacctactgcgaaaagaagcggaaggttatcgaaaacaatctgcccagcgctttccatcacacctgctacaagctgaacattgtcattgctcaagaaatgcaggacctgaatcatgtccttattttgcatcgcattcccgatcgcaagcaaaatacccgcagccggaaggatcgcaactggaagcataagcgcacgcccaattttttgaagaacgccgaataatgctttaaacataagaattgacctcctctttttactagtctgaccttacagctaaaaatcatgacaacgaattcacaggcgtaagtcttccagtttaaccgtttacatttgcccttttacacaacaaaaaggcatgagcaaaattgggtgcgcaaaagaacgagaatgaacttcccgtttttttccctcaatcactcatgcctgatcgaatcagtaacacgttataaggataaactgaatttatgacattttattggttaatcggtacagatgaagcgtcagataaaccgcttccgcctcatgaactggtttcttcaatgtttgctgcaagattttaatcaatttccaagctgtattgtagcatagcggatattcatttttcaataacaacattaatttttctggttctttagtcggttcttcttttttaattctttctattgtaaatctgatatgcctgatcagccgcaaatagttcacactttccttatttactttcatttgaaatgagtcttcaatcacctcgacaagctgcgccatgagctgagagtgctgattgacctcggacagcggacggtttgtcaacgctgaatggatatgcagagcgataaaaccaatctccccttccggaaggcagattcccgctttttcattgatcatatctatgacttctttggcaatttggtactcctcaggatatagtgactgagtctccattagaaatggatttttcatatcaaatccctgctgctgccttttgatcgcaaatgcgatatggtctgtcaacgcaatgtgaatatgttcatttaatgagtgattagtcctattgcttatgtgatagatgacatcgtttgaaatatcaacgaggttttcatcaacatagtcaaggagctttttaaactgcttttgttccttctcgtcttttaaaatgaacattttatcgtagcctttatcttcaatgacatcatcttgtttttttccgaaaccaataccttttccgattaaaacgacttcgctgtatttatgatgagaagcaattaatacgttattattcagtacctttttcactgtgaaggacccattcacgatcctcagctcctttgtcattcaatacctcatatcgtacataacgaacagaatgcacgtcaaaccttttttcaatgcattcactaaacagtcgatctttcgatgagacggtaatccagaactttcctttcaatcggctgtccttgaattcttttttccagtatggcaaatgcctgctttcccatttcccttgtctgaatatcgatcgttgtgattccaagcgcttggctgatttcgtggttatcaacgcttaagattgcaagctcacccggtactgacacccgctggttctttgcttcaagaaaaagccctgctgagacttggtcattggcaacaaaaatagccgtcggcttttccttccacgtattccatttatgaaaaagcgccttcccatcattgattgtaatcgctttctcaattacccagtcttcacgaaatgcctcgccgatctcttccaatgcctctttgtaggctttgattcgaaaatggctgttcatgcctttttttcttgccaaacagatggctatttttttgtgccctttggcaattaaatagtccaagccgttccgaaatgcttcttggtgaggaatgctgatggttgggaagcgggcattatctgaattctggcaaagcaaaatcgggccctcccattccatgagtttctcatcagcaagcgcctttgagcaaaaaatcaggccgtcaacctggcgctgctttaattgggacagcgcaaagatttctttttgtacctcatagtttgtttggaataaagagaggtgaaccccagattccgcggctgcgtcggctattcctgcaatcagctctgcaaaatatggcagattaaccgtcggcaagacaacaccaatcatgtttgaaaatcctttcgacaaatgtacagcgtgaatatttctcgtgtactccaatgattccattgcctcaaacactctttttcgtttgtcttcactgacgtatggatgattgtttatgactcgggaaaccgttgtaacagagacaccggctttttctgcaatgtctttaatattagccatagattcccttctttctaaatccccttgatctggaatgcgtttcatacaatatgatatggacgtaccagatatctttttgtgttttaagctgaaaggagaagatcacatgggtttcttcattttaattgggttatgtctcactgttctcggtggcagctgtcttgctgtaaaacctctcaaccaaaaacatgaaattaaaccctttcgaacatttgatgatttttttatttaatgcagataaaaaaggacgatgtcgagaacaaagtccttttttatttctattacggcagtatgattaattcctttggatattgggtcagagcaactgctccgtcctttgttacgtgaacgtcatcctcaatgcgcacgccgccgatctcaggcacataaatccccggttcgatcgtgtagaccatgccttcctgcagcagtgtatcgttggcctggctcattgatggatactcatggacagaaattccgagtccatgcccaagccggtgaggaaaatagtcaccatatcccgctttttcaatgattccgcgggcagttaaatccagatctccgattctcacaccgggtttgcttgcctcaatcgcggctttttccgcttgaagcacagtctcgtaaatggcctcctgcttcggattgatggttttgtatgcaaacgttcttgtaatatcagagcaatagccatcaagaataacaccgagatcaaataaaacaaaatcacctttcttcaacgtggctgtaccaggatttccatgaggctggccagatttttctccgaataaaaccattgtagagaaagacatgccctgaattccttttttcttcagctcatactcaatttgagcgagcacttccacttcactgatgccttcacgcaaagcagctgtgccgacttcaacaccgtaatctgcaagctttgccgcctctttcagcaaacgaatctcattgtcatctttaatcaggcgaaattgattgagtgtttcttctgctgaaacaaattgagccccgccagtcgcatgcttcagctgttctgcacgtgatagcgagattgaatccttttctaccgcaagcgtatgtatgctgatatttcgctttttcaaggccttctctatcagctcccacggattttcgtgatccgcatagccaatgatttcatgattccagcctgcgttgcgggcctgtcctgcttccattcctggacaaacaaagaaaggctcctcttcttgaaaaataaataaccccattaatctttcatgcggctctgtgtaaaaaccggttaagtaaaaaacattttcttttgtatgaataaatgcggcagtatgccccgcttccttcagccatgaagagacgcgttgtattctattcacttcttgttcctccctgccatttgcaatgcattgttctgtcttccattgtaacaggttttaccggtgtttgcctttcacgacgccttcattttctaatgcattttatttcctgctcctcttcctgtatactgacagtaacgttcaatcgcaggggggttgttccgtttgctgatgaattttttcagacgaaaagcagttatgctcttaacggttttgggaatttccgctccttttatcgggatgaagatggtgggcttttattattacagctctatcataggctgtgcagcgggtttcctttgctgcatcctcgctctcatcctggttatgaaaagatctgataaagacaaaaatgaagggaaagcttgatacataaaaagccagcagcctgattaggctgctggctttattttaggagtcttaaaccgtttagtatgaccaaaatcgtgctgccctcatgaccaatcacgccaaatggcaattccatcacctgcaaaaagtttgcacaaatcagcaggcagattacagctagagaaaacacgatattttgtttgatgatcttgttcattttccgagacaagcggcacatgtttacgagctttttcaaatcgtttttcatgaggaccatatcagcggtttcaagtgctacatctgttccgccgcccatcgcaatgccgacatccgccgctttgagtgccggcgcatcattgattccgtcacccaccattgcaatcgttccgaattcttcttttaaccgtttgatttcattcactttttggtccggcaggcattctgctacgacagttgtcatgccggcttccttggcaatcgcttgagccgtgtcttcgtgatctcctgtcagcatggccgttttaatcccaagtcggttcagttcttccatgacctcttttgcttcaggcctgatttggtccttcagtgcgatacagcctgctatttgatcatcctttttcacaaatacaattgtatgaccgctttgaatgacatctgatgctgtttgtttcaaaaattgtgctgccatttcctcgccgataaaacctgctttaccgaccttccatttcgcacccgacacttctgccataacgccaaaccctgaggtttcttctatagatatgtagctggactgattcacgccgcggctttcagcgtacgccgttatggcttgggcgagcggatggcttgattgcgtttcgatggcatagacagcctcaagaacttccgcttcactgaatccttctgctattctgatcgtctctacggcaggctggccttttgttacagtgccggttttatcaaaggcgatcatttgcactgagcccagctgttcaagaaagacgcttcctttcacaagcataccgttgcgggcgccatttgaaatcagggacagcgccgctggcataatagaggcgacaagcgcacaaggtgacgcgacaaccataaacaccattgcgcggtagaaggtttcactccagctccagcccagcgcaaagtgcgggacgaataaaaggagcgccaccgcaattagcacacctttcacataagcattttcaaatcgttcgatgaaagcctgcgcgggtgaaacactattttgcgctgattcaaccagtttgataatttttctgaataacgaatcttcatttgctttcgtgacacggacagtcaaggagccattgcgattcaccgttcctgtgaatatagtgtcgcctgtgtttttttctacaggcattgattcacctgttaaagccgactcgtcaagacttgtcgagcccgattcaatgataccgtctgccgctatgcgttctccaggtttgatcacaatcatatcaccggcctgcaagtctgaaaccggaactcttttggtttcaccattgaccatcaatgtcgcttcttcaggctcaagctgcattaaagacgttaaatctctgctgcttttattcatcgtgtatgtttctaaagctccgcttaaggaaaaaataaatattaaaatagcaccctctgcccagtatccgatcaaggcggaaccaacggcagcgaaaatcattaaaagttctacattcagcgttttggattcgagtgtttcttcgattccttccttcgctttagcaaatccgccgatcacaaaagccagcaagaaaagtattatggataatacctgatatccggataagagccagcctgccaaaataagagcgcctgatacaagtgctgcaataagctccgcgtgctgtgcccagtttttttccctcttgtctgttttcaatggctcatgcgggtcgcgttgaacgataacttgttcattcatatcgaattctcctctctaattgagaacgtaaatcatcttcatttctcttataaaaacaaaatcgctgcccaaaaggcagctttatcgtcagttatttcttgatgtcttcctttattatagcacgcacgaagagaatttcaattataattattttaatttctttttgataataattatcattaatgtttattcacttcttctctatatgaaaaaagctgagagtctatgctctcagctattcttccgtccattccttcagttgttccgccgtcatcgggccaatttttgttttttcaatttctcccttttcattcagcaaaaatgatgttgggatcgtgatgatatgatactccttcatcaattccccttttgagtcaaggacaattggaaacgtcagcttgtttgctttaataaagtcttcaacgacttgctgattttgttccgaattcactaaattcaccgttaccagctttacactgtcggatggatgggcatcataaaacgattgaaactgtggaagctcctttttgcagggcggacaccatgacgtccaaaaatggagaattgttttttgccctttattcggaatcgagatgtcctccccttctatcgttttcataagaaaaacagcgggaacagcaggctgtttttcctcagcttgtgccgcacctggaatccatacaatcaaccctaataacataatgtatatagtaagcaagcgcttcgtcaacatggaatcttcctttcatgcttttcaattagcttgcccctgcaattcctatatcatccttcaattcgcggcgttctggtccctcccgtaaggaatacggataccttcaatgttttgcagatcgtggcatagtgcaggctcgtcaaaagaatcatgccagtgttcattccaaggataatcccgagcatttgcagattctccattgatcccagtacatacatcatacttagcgcaacgatatggctccatacattgtgataaaaagcctctttcacaaagcccatcccgattaagcacgcctgcagcggcatgacaaacagatgaaagagaaagtaaggccacaacagctgcaaataatactgcgcttcaggagagtgaaaaaacaaatgcgtgagaggtcccgcaaactggaacatgacccagacggcaggtataccgtaacctaatgtaatgaaaatcgactgcttcagcctttttaacacgatgtcatactgagaaagtgcataagcttccgaaatactcggtatcatgacgaccattaacgaatgggcaataaaagcagggaacgaccctatcgtcacagccactcctgccagcattccgtattgatcgatcgccgctgtcccggcaacgcccgcagccaaaagagctccttttactaaaaagggttcaattgcattgacaaccgcatgaaaaatgcgcagtcctgttgtaggaattgaaacagcaagcagtcttttccttacatcctttccgcgcaaatgaatatgctgctggccggataacgcccgccttgccatgataaattgtgaatataaataaacaagcacgaccacatcactcacgactagaacaaacaaggaaatcagcacggccatgtccaattcaaatgagtaccattgaaaaaagaggaataagcacaagagctggatgatttttttcagcacattggcaattgcgatcttccccattttctgcacacccataaagtagcccctggcgattgaagtaaaggcgacaacaggaattaagccgatgacaatccctttaataaacgggtggtatgtatcaaataccggaataaacggaagcgcaatactagcggcggcagtagaaaaagcagtaaaaatggctgtcattctgaaagcgtgccttagcatgctttcatgaagcttaggatttgactcggcaatgaatttagaaatggatatcggcagttccaggctcgcgatgacaataattaaaaagatcgtgggcaaaatactcatgtaaagccccatcccatgctcgccaagctcccgcgccaaaatcatattgacgacaaattcaaggcattcagcgaaaaaggcggcaatggataaaagaatgatccctttcacaaatcgattcatgatgtctctccttgtctcttgtactaccaacatcatatgagacaagttcaaaaattattttatttttactctttatatgaaaaaaagcacagctgagacaaattgtctcttctatgcttagacggcaaaaacgtgtctgccgattttttctacgatttttcttgaacgaatccaattatctgacgctgttttcggattataaaagaatatggcatctgtttctctattttttgaggacagcgcttcttcggcagcttcaatcgattctttatcaggcttttggttaatgctcccgtttgcgaccggttcaaaggcgtttttctgataaataactcctcttatcgtatcaggaaaaccttttttctccgtcctgttcagtacaacgcttgctacagcgaccttgcctttatatgattctcctttggcctctgcgtgaacgagacgggacagcaactctttttcagactgtgtatatgtttctttctcatcatttgttttgttcggtttatctttctctttcttttcagtgtgtgctgatagcttaatcggttttattttcttgtctttatcagcagacagtgaagggaaagattcattcgtatttcgatctatatgtgtaagccatttcgcttcttcatgttttgtcttctttgcgctcagtagtgaagcttgtgtatgctcaattttggctgcaggcatgaaacaaagaagaaaaacagccagagcagtgaatttcgttgtcatacagtttcctccttaaagtgctccaaaaaacacttcataaccttaacaagagatccattcattttcacggaaaaagattttccaactctcccaaggaggtatcaggatggaataaagaggatgactcactgcttaatggcaaaaaaacagtctgaaattctataaatattgttaaattaaaacatgtttatccatctttggtactttacattttatttacacctgttacagacagctgtaataaaaggcttgtgttctgtcatatatgataaaaaggtttctcacgtatgagaaaccttcagcttcttggctgttctaagtattgaaagataacatctccgccttgctgggcaattcctcggaaatgtttaaaatcatcttgtttagataacacggccctgaaatcaagaaaatgctctttctggactctcagttcgtttatggcgccggtgcgcagctgttcaatcatttctgttatttcttcgggacgcaacaaaaattccccccttttctttctattgacgaaaatcaatatatcatctttatagcgacaggacaattcataagggagataaaactccttatcgctttacttctcaatgaaaatactgcaaaatactttcaaaaggcattattatgtttaaaggagaggaagcttgtgaaaatcgctaaggttgggaatgtcattgaatttaaaaacggattaaccggtgttgttgaaaaagtaaatgagaattctgttatcgttgatgtgacgatcatggataactatcgggatcttgagttagattcattgacagttgttaatcataaaaattataagatcatcagagactcctattaaaacctccttatttccacatttattcaaaaaactgcaagacggacaatttaacaccttacatatgaaattcgctttctcaaaagctgccggccggcagcttttttacataaaaaacaccgatcatgaatcggcgtttttgtctatttccgttatttctatatagaactcgctgacggcccctggttcgtacaggttggtcaatgatgttgaataatttgtcatttccccccggaaggcaagatcgcgttccggaacctcgacattaaacgttttttcatacaacaggacagcgatatcatggtaagtctcactcgtaacgtttaaggtaaatgcaatttttcgcttcggctcgctctcctcttgatatgcagccatttctaacgttacattgtttaaccgcaatgtcttcacttcatatcactcctttatagtccatgcatcttagcataccttagcgaatgtttacaatgaatctgttcttaatggttatatgaaccaattcatttgaaaagacacctttacaaacatacgttcgttaaattataataaaacagacgagctgccatccagcatcccgtcttttcattagaaagcggcgagtggaattccccccggattcgctcgtcttttttatgtaaaaaccccctcatttctaaggagaaactatatggtcgattatcaacaagtcatgcttcaccatgcgtacaatcaattctcatcatgttttttagataaaccagcatccattcaggaagtatatgagtgtatgcttttaaagttctagttagtcgtgcgcttccatatcgatcctgaacaattctgaatgaaatgcgataaccctgctatcaagtagcatgtgtatgattaaatcatggaagcagaataaattcaacacatccgtaaaatgcgtactataacataagtttgaatgtgtatttcaagcccaatgtaatgcctcgtgtagaacattttgggagaagggcctatggaatgccctcactgttttacccgcactcgtaataaactcctttcagtatgtccatttagagattcattgcaattatcttcgaattttgttctgaactataaatcattatatatttttaaacactgtattccagactgacgcatcttcttgtccaagactccagctgccaagacctttcagattatatttttgagcgagttttatttttgctctgagtgactgttcattttcaaaccataatgtatatgttcccgaaggcaacggccccttgttatcgtgattgacagtaaaaatagcttttggagattgactcttggtgtcaaaaataattgttccgctatgcctttttactaatgagtcaacaaggtaaaggggaatggcttgagaggcagattggccttccatccagcagcggccatagaatggcaatcctaaaactagtttttgaggagagattttttgggtcagaacatattgaatggacttttccacccatcctacacttgcggtaggcccagcaaggcggctttcatcataggccataaccataagataatctgcatatttagctaaatactcgtaatcatatgatccgtgccagcccttcgtccagccaaaaggatttgccgccactgcaactgatacttctttatgtttaggaatacttttccttactaatctaataaaatctgtaaatagattccgatctttttctgtaaggttttctatatcgatattaactccgtccaaatccagttcttctattgcatgagaaatttgtttagctaaaagaactcggttcattaatgcaaatcgtcccaaatcctgatcccaatgattgcttagaaaaggaactacttttaattttcttctatgaagagctttaatcacatcgggattagctgaacggagaagtaatgatccatcttttctgatatagaaaaaatcaggagacacaacatttaatactccgttcgtttgatcaacgtgttgaataaaatcccatcctaatccagaatagaaatagctcatttgaaacatctcataaccccttcatccccaaaaatatcaagttccccacaaataaaaaaatgaggattgtcatttcaatttgattcgtttccgaaacctcaaagattatctttctcttatctttataatttgtccaggataaattctatctgaagaaagcttattaagattcataagttgttgtaccggaattttaaaggatttggcaatcgtccataatgtatcgtcggattccacatgatatacttcgtatgtcacgggaaattccatataacgaggcgttctttttactttattcgcttgatttcttattttaggtattttccccttcattcatattactctcctttagaataatttgttattaatatttctaaacagtttctctctaatcttaatgatttgtccagcatatatttgatctgatttgaaatgattaagctccatgagttgctgcagggaaacattatacttcctggcaattattgataatgtttcaccgggagtaacatgatggatcacgtatttttctttgagaacatctacataatgaatggtttcccctaagtttcttataattcctctgctttttagcacctcaagcattctctcggctctatgccgataggaatcattctttacagcctttttaccgtttatctgaatcttttttctctcgctatcatgattcaaatagtatttaaccttttccaaagtttcttttggggaggaagaaacgatgagatcgcggccaggtttgaatttatctcgaactgctggtgtatccgatgtcaataaaaaccccccggaaccaagaatctcataggtgcgttgcgtaagttggctttcacagttttgcaaaccgataatgatttttgctgaactgtaaactttatatgcttcagtataatcaaggtatccatggatccaattgcgaggaatttctcttcctatatatttactcattttttcccaatttctcccccaaaaatcaatgcgaatacctttccgtataagaggacgaataagcgtttttaaagaggacgaacggaacacttccggatgttcttcaagaaaattagggtaagcattagccaccactgctatatcacaactgtatttcgctaatggtttaatctggtgatgtatactttcgtgaaatgcaaagtctaagtgagctgctttaatccccatgctttcataagttttacacagagaaggcgtaaccgtgaaaacaaaatccggtttcatctttttaattaacgggatagtaaagttttgagtgtgcagcgggtcttcagttgcccaataaacgagagggatattcacctttttagtagcgttgcgaatccaggcctgcttttcccttgaatgctctggtgtccatcccatagatactattagatctggtttaaattcgtctatcatttcagtgatattttcccgacttacaggaccggaaatcattacggtatgtcctgcttccctaaacccattcggtaaaccatagagccacatgggatgactctcaaggaaaagaattttcacacatttccatcctctctttcactttttaatgtctactttattggtatgtatatgtaatataacttgtcgcggtactagtctataaaaaaacgttcaggtgtgagatcacgtgatagcttgtgtgggatgccccacaaaaaaagaaagcaacctacaacatattttcctatgtggttattcaggacataaggattcctttaaatatttttaaaagtattagaatacaaggacagggatattattttttattaaaagtcaagaaaatgtttaattttattaataattaagaaaccaaatgaaatgtcacacattttataaacaaaaagagaggatagatgaacagggtgaaaatgcctgtattcaactatcctttttttgtacaacaaatgacctcatttactacaacaacggtgttgtttgttcttcaactaacgcccccgttactttaagtacatttattcacagtgtaatcttttttacaggtcatttagtagtagccccaggaaaatgcgaatttacaacgttaagcaaattcaaatataaaaaaggcgaattccctgtcctttaaggaaaacgacttttttatacgacttcttcaagtaaatccccattaaccttttttggggactatttgtaatctctgcgcagggaaattatacctgtgctagcccgccatctacgaacaattcaacacccgtcaagtaactgctttcgtctgaagcaaggaaagatacagcgtttgctacttcttcaggtgtcccaacttttccagctggaacagtatttctgctattttccagtacctcttcaagtgcatcaccaaaaagctcatcgtaggcaggtgtaagaatacctcctggactaaccacatttacacggatttcagtaccttttaggtcaagaatccagttgcgaactagtgctcttaatgctgctttagatgctccatatacactaaacgctgggttgccaattgatccagcagtagagcccgttacaataatagaacctactttgtccgggaatagtgataacgctttttgaacagtaaagatggttcctttaacgttaatgtcgaacgttctatcaacctgctcttcagtaatttcacctaatggaaggaagttgccgatgcctgcattagcaaaaagaatgtccaacttacctttttcctgctttataatgtcatatagtttgtctaagtcttcaagcttagaaatatcaccttgaacaccgcttacgttcttgccaatttggttaacagctttatcaagttcgttttgtctacgtcccgtgatataaacatatgcaccttcgtttacaaatttttgtgctgtagcaaggccaatcccacttgttccacccgttacaagcgctattttaccttcaaatttacccatacttaacactcctttagaattaatattattttatgtctagtacctttaagtacttgaagaacaacttacaagatatagtatccttcagtaagcacattatcggaagtacccacttttttgtgatatagtaactaaaaagtaataaatgtggaatggagagctttagacatgaaaaaatttagctgtgggtttgaagtgacaaaggaagttattggaggaaaatggaaaggccttgtattatactttttaatgaatggaccaaagagaacgagtgaattaaagcgcattatcccaaatataactcagaaaatgctgattcaaacacttagagagcttgaagccagtggacttgtgagcagaaagatgtataatcaagtaccgccgaaggttgaatattcatccactgaacttggagaatctcttaaacctatcttgcaggagctctgtcaatggggaggctattatgcggagcaagagtatgcagaaggtgaatatgaaattgtacaaccagaacaactaagttaggattgatgtagctgctgaagtaaatgctaaacaacttcaataccatcacctaacagatgaagaacagtcagaaataaatcagatattcaattttgaaagtgaagttctaataagaagtgtcgattatattcaggagaactttgatgaaattcaaaaaagagctgtttcaaatgttaaagagaagattcagaaacttagccaaaaaataatgaagatattgataataatatttaatgcctatgatctctagataggcattttttctttcgaaaaagaaaagacgtacaaattgtacgccttaatctgcttctgtactatcaatttttcactgcataaaagtcacagttcaggttgcacctcaggtcacactccggtcacttcgggtcacatttccgctgaaaattaacgctgaatgttcggattttactgtgactccacttccttttacactccgtatcacacaacggaataattaacgattatcaattgtctccggatacaaatcatggttcatcatacggtattcggccattttctcatacttcgtgccaggctttccgtagtttgtgtacgggtcaatggaaattccgcctcttggcgtgaatttgccccatacttcaatgtagcgcgggtccattaattcaatcaagtcattcatgatgatattcatgcagtcctcgtggaagtcaccatggtttctgaagctgaatagatacagctttaatgatttgctttcaaccattttttcatcaggaatgtagctgatgtagattgtcgcaaagtctggctggcctgttttaggacataaagatgtgaattccggacaattgaattttacaaagtagtcacggtttacatgtttattagggaaggattccagcacgtccggtgcatattcgaacaaataatttgtaccttggttgcctagcaatgttacaccttctaattctgattcttttcttgtcgtcatgttcatcttcctttctattatactccgcgtttgttgccccataacagggtgtgcagctgcgggagcactctgacgagattcagctccgcatcgacagctaccttatcaacaagcgcttcatatttcccaagcaaatgtgcaatcagtgactgatcatctgtcgtatgcacgtcatcatttccgacttgtaaataaaacgggattcccggataccgcttgtgcacagttttggcaaattccagatcttcatcattaaagatgacaaccttcaagctgacagcatgctgtctatcattctcttgaagtgaagttaaaatgtggtcaagcttttgaaagttcgttaccatttttgagcttggcggttttggagaaattgtcaggtcatcaatcagcgtaaaccaatcctgataaacggtcccttgagtttcaagcgctgcacgaatgttattttccttcagcagttcaataaaagcatccagctgttttaacagagccgggttgccgcctgagatcgtcacatgagaaaacgcatctcccccaatgtccttaagctccgcaaaaatctcctccgccgtcatccagcgaatatcttttttagcagacccatcccaagtgaaagcggagtcacaccagctgcaggaataatcgcagccggctgtccggacgaacatcgttttctgtccgatcaccatgccttctccttgaatcgtcgggccgaaaatttctaatacaggaattcctttagccattcaaaccaccctttttcggacggtagacacagtagcttgtcggtgtttcacggacaaacacctgtacacaggtcggcttattctccaaagtgtctaaataagcctgtacgttgtcataaatcgttttcgccacgacttcagttgtcggcagcgaataccggtcgtcctgagaaaaatcttcatgatcatttaatagcgtgtgatcatagtttccgtgcaccagttttttgagtacgctgaaattgacaagaaagccggaatcgtcaagttcgtcgccggcaacggttatatttacggtatacgtatgtccgtgaaccctgctgcacgctcccgcactttcccgagggataaaatgagcggctgagatatgcatgtccttattcagttcaaacgaataaggatgctgggcctgcggataaatttgagataacaatttatgcacgctctcctttcattatcatatattcttcataaccttttgaacgaaggtgacatgccggacattcgccgcagccgtctgcgatgatgccgttatagcatgtcagcgtgttgtttttcacaaaatccagcgcgccaagctcatctgcaagcttccacgtttccgccttattgagccacatgagaggcgtgtggatcacaaacggcttctccatcgccagatttaccgttacattgcaagatttcacgaattcatcacggcaatcagggtaaccgctgaagtctgtctcgcaaactcctgtaataatgtggcgcgcgccaatttggtaagccaggatagacgcaaaggataagaataccaaattgcgacctggaacgaatgtggatggcagttcgccgtcttttacttctatctcaatatcatttctagtcagggcattcggtgcaagctgatttaaaagtgacatatcaagcaaatgatttttcacaccaagcttttccgcaatggattttgccacttcaatttcctgcgaatgtcgctgattataatgaaaagtcaccgtttcgacttcttcgaattcttttaaggcccacagtaagcatgttgtgctgtcttggccgccgctaaatacgacaattgctttttcttttttcatgattcctctccttctccgcaataaaaacgccggcgagagacatcgctacagctaattcacgcaaaaaaacacctttttttcggaaggtgctctagaaaaacataaaaaaggccgtatccaaggatacagctcgtccttagttttttatagagggtgtagctagaacctctcccgcatatcgcacggattttcttcaattttttcacttctgctatcttaccataatgttgtttttcttgacaataaaaaagtcaatccccggttcctagatcaattatcgctctatagtgacggttcgcttcattatatatatttataaactgcgccgtcgaggagcctttttgcaaagcaaagcgcctatgaaggccaggctcacatagccaaacaagggataaatcgttgaaataagcttgccataccctatttggctcgtaatataagccgtgatcataatagctgtaaagatatatttgcttttcaatggaagaaagctttgcacttgtttttctaatccatatagattaccgataactgatgtgaacacttctccgaaaataatgagtaaataaatcaaatggacagatcgtgcaaagagataaaccacttgtgccatcggtatatcatacaaaaatacatccggaagagttgacaaagacagaaaactcgcggacagcacaatcgtcagcatcgtccctccgattaaagcgccttttttgatcactttctccgaggacatttcattcgccagcggaaccaaaactgcttgggcaagcgataaattcaaagccccgtaagaaaaggctgataacagccaatcccagcgatgcggccagacccactgagctgcgtttcgtgattcgctgaatataaaagagtcggccactacaatcattgaaaagaggattaaaaggggaacaacaaacacattgacaccgaaaatgccttttactcctctagtcatcacaattaagctcagaccgattgtaatgagcatcccaatctgagcggacatccccaattgttcctcaaaaagcgcccctgctcctgaaagcatgacagatgtaactccgaggagaacaaacagcataaatacattgataatccgcccagccgccgccccgaacaaaaagatgttcatttcttgatatgacttggcattgattcgctttgaaatgatcatcagcttggcgcccagaaacgtaaacattccgccgctgacgagaatgccgaataaaccgaaccagccgaacttcagaaaaaactcaacaatttctctgccagtcgcaaatccagctccgactactgtgccgacatacacaaaagcaagctgacttgcagacccttttgattgttccatttctcccctccgaacgaaccgcagttttgtccatagatgcctttttataacctatgagacaagttccttgaaaagacgaagaaaacatgttttactttgtaacaaatcaaaaattttttgtgcataagacttgaaagtcaaagttagtcagagtatactattaatcaaagttggtcaaacaaaccggccttttttaaaaatcaattggtcaaagttagtcaaatattcagcctgctttgagcatattggtttgaatgccgttaagtttgccgtatactaatagtcaaagaaggtcaaatccaatagacctttttattcactttcattggtcaaagaagatcaaattattaaggaggttttggcaaatgcgttgtcaacattgtcatcaaaacgaggcgacgattcgccttaacatgcaaataaattccgttcataaacagatggttctttgtgaaacttgctataacgaactgacccgtaaaccttcaatgagtatgggtcctcaatctttcggatttccgtttgaacaggcattccagccgaaagaaaagagcgcagcaaaacaaagcggaaaaaaagggttgcttgatgagttggctcaaaatattacaaacggtgctaaagccggtctcattgatcccgtcatcggccgtgatgatgaagtggcgcgagtgatcgaaattctaaaccgccgcaacaaaaacaatccggttcttattggtgagccgggtgtggggaaaactgccatcgctgaagggctcgctttaaaaattgctgaaggcgatgttccaaacaaactgaaaaacaaagagctatacttgcttgatgttgcatcccttgttgcaaatacagggatcagaggccaatttgaggagagaatgaaacagctgatcactgagctgaaggaacgaaaaaatgtcattctgttcattgatgaaattcaccttctcgtcggcgcaggctctgcagaaggatcaatggacgccggcaacattctcaaaccggccctagccagaggcgaactgcaagtcattggcgcgacaacactgaaagaatatcgtcaaatcgaaaaagatgccgcgctggaaagacgttttcagcctgtcgtggtgcaggagccttcaattgaacaggctatcctcattctgcaagggattaaagacaaatacgaggcgtaccatggcgtaacattcagtgatgaagcaatcaaagcgtgtgtcactttatcatcccgctacattcaggacagacacctgccggataaagcaattgatttattagatgaagcaggttcaaaagccaacctgttaattgatgaactgaatgatgaggatgccgctgaacgcttaactgcaattgaagccgaaaaaacaaaagccctggaagatgaaaattacgaactggcggcaaaactccgtgatgaagaactcgcattggagaaaaaactgaacagctcctccgctcataccgctgtcactgtggaagctgagcacattcaggaaattgttgaacaaaaaacaggcatccctgtcggcaaactgcaggcagacgaacaaacgaaaatgaaagaactcgaagcaaaacttcatgaacgcgtgattggacaagaagccgctgttcaaaaagtggcaaaggcggtaagacgaagccgcgccggtttaaaatccaaaaacagaccagtcggctccttcctcttcgtcggtcctaccggcgtagggaaaacagagctttctaaaacactggcagatgaattattcggcacaaaagacgctattatccgactcgatatgagcgaatacatggagaaacacgccgtatctaaaattatcggttcaccgcctggatatgtcggccatgaggaagctggacaattaactgagaaagtgcgccgcaatccttacagcattgtgttgctggatgagattgaaaaagcacacccagacgttcagcatatgttcctgcaaattatggaagatggccgtctgacagacagccaaggcagaaccgtaagcttcaaagacactgtgatcatcatgacaagtaatgcgggtgctggtgagaaacaaacgaaagtcggtttccaatcagatgacagtgtcatcgaagaacaaacattaattgattcactgagcatgttctttaaacctgagttcctcaaccgttttgacagcattattgagttccgctcattggaaaaagaacatcttgtcaaaatcgtcagccttcttcttggagaacttgaagaaacattggcggaacggggcattagcttgaatgtgacagatgaagcgaaagaaaaaatcgctgagctgggctaccacccttcattcggtgcacgtccgcttagaagaaccatccaagaatgggttgaggatgaaatgaccgatctgctgcttgataatgacgagatcacaagttttcacgtgattttagaagatgataaaatcaaagtgcgagcgaaataacaatcagcggtttccttttaggaagccgctttttttatgctttcatactcttgacttagaaaataccgtcccttcccctgaagcgctacttcccttcatcctttacactttttttaaggagggatggaacatgtttatatacagtgaatatgtatttctactattatatgaataccatctgaaggacagcttgcaagaaagctgataatttcagtagacacccgggcttttcaattttggagagcccgtttttgtttatttctcccttctatgcctcttccttgaatatttcatgaacaaattcacaatgtccctaaagttccgggcaccaaaaccgatattaaccatagacaagatagtaaaaaaggatttggtgaaaaactatggataaaacttcgttaatcggtattattcttgcttttgtggcattgagcgtcgggatggttctgaaaggcgtcagtttcagcgcccttgcaaaccccgctgccattttaattattatcgccgggacaatctcagcagtcgttattgcgttcccaacaaaagaaattaaaaaagtgcctgcgttgtttcgagtgttatttaaggaaaataaacagctcacaatagaggaactcattcctatgttctctgaatgggctcagcttgcacgccgcgaaggtctgcttgctttagaagcaagcattgaggatgtagatgatgctttcttgaaaaacgggctcagcatggctgttgacgggcaaagcgcagaatttatcagagatattatgacagaggaagtcgaagcaatggaggacagacaccaagccggagccgctatttttacacaagcaggaacgtacgctccgacacttggagtactcggcgctgtaatcgggctaattgccgctctctctcatatggacaatacagatgagcttggacacgccatcagtgccgcctttgttgccacacttctcggtatctttacagggtatgtgttatggcatcctttcgcaaataaattaaaacgaaaatcaaaacaagaagtaaaactgcgtgaggtcatgattgaaggtgttttatccgttttagaaggacaagcaccgaaagtcatcgaacaaaagcttttaatgtatcttcctgcgaaggaccgcttgaaatttgcagaacaaggagaggcgcaaaatggcgagaaaaaagaagaagaagcatgaggacgagcacgttgatgaatcatggctcgttccttacgccgacatccttactcttctcctggcattgtttattgtgctgtacgcgagcagctcgattgacgcagctaagtttcaaatgctctcaaaatcatttaatgaagtctttacaggcggcaccggtgtactggactactccagtgtcactcctcctgaaaacgagtcagacggcatcgatgaagtgaaaaaggaaaaagaagagaaagagaaaaacaagaaagaaaaagaaaaagcagctgatcaagaagaacttgaaaatgtgaagagccaggtggaaaagttcatcaaagataaaaagctggaacatcagctggagacgaagatgactagtgaaggccttctgattacgattaaagacagcatcttctttgattctggaaaagcgaccatccgtaaggaagatgtgccgcttgcaaaagagatttcaaatcttcttgtgattaacccgccaagaaatatcattatcagcggacatactgataatatgccaattaaaaattctgaattccaatcaaactggcatttaagcgtcatgagagcggtaaactttatggggctcctgattgaaaaccccaagctcgatgcaaaagtgttcagcgccaagggttatggcgagtataaaccggtggcttccaacaaaactgcggaaggccgaagcaaaaaccggcgggttgaagttctcattttgccaagaggcgcagcggaaacaaatgaaaaatagcaaaaaaggaagccttgtgacatatcaggcttcctttttttacttattatgaaactgttttgcgtttaatcctactctttttaacatttcggtgcacatctctacctcttcttcgcttaatacgctgatcatttcatcaatttcagcagcgtgatcagggaaaatatcattcaaaagaccgatgcctttttcagtaatttgcgcaaatgtcactcgtctgtctgtaggagacgctttccgaatgagaagttctttttgctccagcttatctacaacgtatgtgatgctcccgctagccaagagaattttatctcctatctgctgcagcggctgatcgcctttatggtacaaaagctctagcacagcaaattcagtcggattcagcccatgcttatgaatatgcttattcatatgatcgttaatagaccgatacgcgcgcgacagcacgataaataacttcagtgatttttctgtcatgtctcaatcatccttttagaaaccgttacagagaaacattaataaacaaagaccaaaatgtcaataaaaatctttccaatatttctcttcttttttaaaatgtaagcttgccaacacctttttctaatttttttggttattttttcttattaaagaagaagaaacaatgatataatacctctaatcaggtgtatgttggagcgatgcaaattgaaaatactaaaaggcgcctgcgggagagtcaaactttatatcatactggtcgtgattccggcaatcgtcatcagctttttcgtatatgaaaaagaaaaagatacaatagctgcagaacataaacaagaagcaagtgtcctgctaaaccttcaccgcaacaaaatcaattatttaatcggagaaacaatggcgagaatgacctccttgtccatcgccatcgacagaccggttgatataaagaaaatgcaatcaattttggaaaagacctttgattcagagccgagattttccggtctctattttctcaatgccaaaggagacgtcaccgcaagcacaaccgaattaaaaacgaaagtaaacctggccgacagatctttttttacaaaagcaaaggaaactaaaaagacagtcatttcagatagttattcgagcagaattactggtcagccaattttcacaatttgtgtgcctgttttggactcaaaacgtaatgtgacagattatcttgtcgcagctattcaaattgattatttgaaaaatctcattaacttactaagccctgatgtttatattgaagttgtgaaccaagacgggaaaatgatttttgcgagcggacaagcctctcatgcagaggatcagaaacctgtcagcggatatctggatgatatcagctggaatatgaaagtctatccgaacccggtcacaatagaagaactgtcgaaaagccttgtgcttccgctttcatgtattattgttctgctgaatatcctttttattctcgtgctgtattatttgctgaagcggcagacccagctggagcgctcagaaaatgaggcgcaaaaattagagctaatcgggacgcttgctgccagcacagctcatgaaatccgtaaccccctcaccggcataagcggctttattcagctgttgcaaaagaaatataaaggtgaggaagatcagctttacttctccattatcgaacaggagataaagcgcatcaatcaaatagtgagtgagtttcttgttctcggcaagccgacagctgaaaaatgggagctgaactcacttcaggacattatcggagaaattatgccgatcatttattctgagggcaatctatacaatgttgaagtcgaattacagtatttaaccgagcagcccttactcgtaaaatgtacaaaagatcatattaaacaagtgattttaaatgtagcaaaaaatggcctcgagtcaatgcctgaaggaggcaaactgacgatctccctgggagctttagataaaaaagccataatcaaagttgtggataacggtgaagggatttctcaggaaatgctggatcacattttcctcccctttgttacttctaaagaaaaaggaaccgggctcggccttgttgtttgtaaacggatcgtactgatgtacggaggctctattcatattgaaagtgaagttcgaagaggcacagaggtgacaatcaccctccctgtatccgcttcatagcccccctgaccatgtcaggagggttttttatcttcgtgatcgggcattgccattcgatttgcttgctggtcttccagaaaaaaggactttgatgaaacgcaacagcattttcaaaagtaaaaaaaacataaaaaatactaaaaaaccctttataccttccgtggcatctaaaaactccatattccctctccccgtcaccttttgctgaatctcaatcgcaaatacgatgacaatgatgactgtaacggtatagataaaggacaaggctgtcatactccatttagaaagccatgtaaacacagcgtgagtgacgccgaaaaagaatatgccaaaaatgccgatcacccaaaaatgcatttctttgtcagttaaatgaatgccaaatattccgcataaggaaataaaagcatcatgaaattgattgaccatttcggtaatgagaatcgccagttctttcattagttccctctttcatatgaattttttccagaaaaaaagagcgcttccgaaaagctctctctttatatatgcatctgataggccgctatttatttgcatcatatgctggcataacatctctgcggggccacaagcctaatttctttacaaggccttgaatcccttgggaatgttcgttttcttgcataagctggtgatattcatttattaaacaatccagctcctgactgtgcctgatcgtgtcatgccctgtaaatccctgctttctagcggcatctatcattaactttcttttttcatcaatagacaccaacaatctttcttgttcagaagaaccgcccattcacttcacccctcgccgctaagaaataggaaacaagtttgattgggttattgtgcattattacagattatactttatttgtaaacatattttcattaaataagttaatttttcaggtataatagatatattgataggattagaagaacaatacccaggtgaagaatatcttaaacacgccgccaggcaggaggaatgcccaatgaagaaaaagaaagcaattatgctcggagcggcaggcggaaaagcaattttgaagaggaaaaaccgaaaaaaatgtattcagcacatcactattttttttcagatgcttcgcgattggcgaaatggcgactaccctcgttcacaggttaaaacacttttgctgttaactgccgcaattctgtatatcgtcatgccgctcgatatcattccagacgtaatcctcggtcttggattcattgacgatgcagctgttttaggtttgatttggacactgattaaaaaagaactgtcacagtatgaaaagtggcgtttgcaataaatataaaaagccccgttcgatgaacggggctttctcatgcttattgattcacgctgtctttttcataaatcggaacccagccttcagttgtgacaaaaattctcaccgcgacaactttgcggtcctcctgaagcgtgaagtaatggcggatattctcaggcacagagattaaatctccagggtttaaacggacatcaaaaaacgtgccgtccttgccttgaatgacaaaaataccgtgtccgcttacaataaaacgaacctcatcgtctgtatggtgatgctctcttttaaagttttcaagcagttcatcaagtttcggattgctgtctgacaatgaaataacatcctgtgctttatagccgcggcgggttgagatatctttaatttcagtttcgaaggtatcaagaatttgctgtttttcttcttctgtcaggtcatatttctctgagagatgttccggaagcttcgtgatatcccattgctcataaataacctcttgactgtccagaaagcttgccacttcctcttgattttcaatcgttgtatttgcctcatcatgaattcgaattgtagccatttcaattcctccttttatttaaccagctgatgctggagtgttttcaatttcaaatggtagctgaacaaaaattcatacgcttcaagcactctttttgcctcaaatgctgttttcccccaagccgtaataccatgatttcggatcagaacagctcctgaatcttctgaaatctcttccgcaaacagtgccgcaagcgtcgggatatgtgccggattttctataatcggaacggtcacttctgcgttctcttcccacaagccgagtgcttttataatttcctggcctttgaatgtgattttcttttggtctccgtataactctgaaatcacattattgtttaccgtatggacatgcaggcagcacccggcattggttttattgtacaaatgtgtatgcaaaagcgtttctgctgacggtttcagagaatgcccgctttcagcaggctctccgttttgatcgaccagcagaaaatcttcaaccgtctctttgcgtttatcttttccgcttgcagtgacgagaaatgttaaaggctcatctgtaaccttaattgacagattaccgctagtcgccggaaaccaatctctctctgccaattcccgttttacttcagcgagctctcgccagcgttcttgttttgcagccattcctgtacctcctttacattctcaatttcctttgttatctcataaaaatcttgatacggaagatgattgaggttttgctcccggcattcgtttaataaataatcccttgcaaagcataggtcagacagctttgctgcctccacatctgtaaccgaatcaccgatcatgatgatatattggttcggttcagaaagttcatggatgaccgacggcttacagcacccgcattgattgctgcatgtgcccttgcaggaatgaggccagtcaatatggatatagtcattgtcaaatgaagcatggttgcaataaatgcggtctttctccacaatgccttcaagcaaaggatatacaaaaaagtccattccaccgcttataacataaaacggaatctcgtgctcattgataaatgctacaaattcccgaaagccttccctgatttttgcatcttctaatacaaaacttgtaatctcttcttttaaacggctgggcagaaggccgaacatccgcccgacaccttccttgatcgacagcgttttggaaagtacgccgtcttttaatgccacccactctgggggagcaaatgttttcatgatatttataatgttgtcgttcatcgtgatggttccgtcaaaatcacaaataataaaaggttttcgagtcgtcatacggcttcaacctttccccatttatctagcgcaagcttaagatccttgcattgttcggctttttcatcaatcggctgggcctctaggaccgcatcaataatggctctgaacgctcgccccccgccttgggcaccgttcggatgtccatgtacgcctcctccggcgttaataatgtggtctatgccgaaatcacgcattaatagctgaaccatgccgggatgaatgcctgctgacggaaccgcaaatgtttggttaaaagcatcctctctcacacattcttcatgaatcgccagtgcatctgctcttggaagcgcaaccgaaccatatggagacggaaagaggctgaagtcagcaccgcaatatcggtttaattttcctagtaaaagagcgtgagaaaaaccgtaaatcggagaagacgtaaacgctccgctcactgctggatgcgccataatcggaactgggatttcaggatcttctgcaaggccttgcataacgtccaagccgtaagcaaagacattaaacaaaagcgcatccgctcccaactcggcggcgcgtctagctttgtctttcagatcagccgtacgtccggtcaaattcaccgcatacagcgttttatgtccggtttgctcatacgtttctttcaatatttgctttccttctgcaattcttgtttcaaaaggcgctagacctgtctcaaagaaaatttcatcgtctttaatcaagtcaactccgccaagcgcctgctgccggagctgttctttaatatcactcaggtcccttccgattacgcctttaaatatgctcattaacagcggtctctcaaactctcccagcagcttccggatgccgtatacgccaaacttcggtcccggcagtgcacgcttaaatgcttcagagaagtgaagatcgatcaatttgatttttccgtccagggacagcttgccaaacactgttgtcagcaaagccggaatatcctgagagaaattgatttcaggataggcaattgtgatgaccgcttgtttttctgatgcaggagttccctctctctcctcaacttttatcacccgccccttgtgcttttgcatttgctcctgttttacaaggggcagatcagtccaggagcctactgtcaatcctgttgcgatttgttctgctttcttctctgtatcggctcccggttcggtcaggagatatgtcgctaataactcactcatgccagagctcctttcattttcatccatatcaaaaaacctcttcaaactgcaatcgcgtctaaagaggtttcgtttctcgtccgaatcttatctctcagccgctagctgcaagaattagcaccgtgctttataagtcggttgccgggcttcatcgggctcgtccctctgcctgctcttgataagaaaatatagattttataaattattttgaattatcccatcgttataaggtcttgtcaatgcttttttgggtaaacaggttcagtttgccaattcgataagcggcttccttaagtctttcttcacttgttaaaagtccgactctgacgtagccctcgccatattcaccgaagccgtttccagccgcaaccgccacattcgctttttccagcaaaagatctgagaactgctcagaagtatagccttcaggcacaggcagccatgcaaaaaaagaacctgcgggagctgttacatcccagccgatttcccggcatgccgtgatccaagcgtttcgcctgctctcatatctggcattttgctctgccacacacgtctgatcggctaacagtgcctctgctgcagcctcctgagtcgctctgaaaagactgacaaacatatggtcttgataaagattgatcgcttcaatgaccgaagcgtttccgacggcaaagccaacccgccatcctgccatattatacgtttttgacagcgtgtaaatttcaattccgatatccttcgcaccttcagtctgcaaaaagcttaaaggcttgcagccgtcaaatcctacagcgccgtaagcaaaatcgtgaacgacgcagattccattttcagtcgcaaaacgcacggtgtcttcaaagaactcagaagtagcaacagctccggtcggattattcggataattcaaatacatcaatttcgcctgttcccttacttcagcggttatgctgctgtaatcagggagaaacgccctgtcctttacgagcggcatcatttccatctttgcttttgcaagtgtgacacccgaccagtaatctggataacccggatcgggaactaagatcgtatcaccgggattcaacaagcattgcgggagctcgacaagaccggcttttccgccgaataatacagcgacttcggtttccggatccagatcaatgccgtactctcttttgtaaaatgcagcagccgctgacttcagactgtatgagccgcgaaaagacgaatatttatgattctcaggatcagcaacagctcgtttcatctcctcgacaatatgttcaggagtcggctgatctggatttccctgtcctagattgataacgtcatgtccttctgcgagctttcggttcactttctgcaccagagaagcgaagaattgtttaggcaattccttcaatacatgagactgttcaaatttcatctattctcaccttctaaaaaaatcttgaaatgatagtccatcatcatatatggttaaatgaaaaaagtaaagaaaaatttggggtgttaaaaagatgaaatggacgatatcttgtcttcaatttgatatttcatacggcaaaccttcggaaaatataaaaaaagctgaatttttcatcgaaaaagaaagcaaacatgctgatgttcttgttctgcctgaattatggacgaccggatatgatctggccaatcttgatgaactcgctgatgaagacggccgatccgctcagagctggctgaagaaaacggcaaaaaaacatggtgttcatattgtcgccggatcggtcgctgtcaggaagaattctgatgtttataatacaatgtacatcgcggataagaaagggcaaatcattaaagagtacagaaaagcccatctttttcagctgatggatgagcatctgtatttatcagccggttccgaagacggatactttgagcttgacggcgtcaaaagctcaggattgatctgttacgatatccgttttccggaatggatcagaaaacatacgacaaaaggcgccaacgtgctgtttatttctgcggaatggcctcttccccgccttgatcattggaaaagcctgcttattgcgcgggccattgaaaaccaatgctttgtcgcagcctgcaattgtaccggttcaaatccggataatgaatttgcaggacatagcctgattattgatccatgggggcgtgtacttgctgaaggcggacgggaagaaggcatagtccgagcggaaatcgaccttcaagaaagcgcagaagttcgggagagcattcctgttttcgatgatatcagaaaagatttatattaaaaaatatattgacaactaactaaattacctgttaccatgttcatcaactgataaattagaattgtcaaacaagtgaatatattctcttatcgagagttgggcgagggatttggccttttgaccccaacagcaaccgaccgtaattccattgtgaaatggggcgcatctttttcgcgccgagacgctggtctcttaaggcacggtgctaattccattcagatctgatctgagagataagagaggcggacatagatgttaagcctccttctctctgagaaggaggcttttttacggccacatattaagtgattacataattggaggttatgatgatgggagtcacaaaaacacctttatacgaaacattaaatgaaagctccgctgtggcgttggcggtgaagcttggcctatttccaagcaaaagcacgctgacatgccaggagatcggagacggcaacttaaattacgtttttcatatttatgatcaagaacatgacagagcattgatcattaaacaggcggttccgtatgcaaaagtggtgggagaaagctggccgctgacaatcgaccgtgcaagaatcgaaagcagcgctctcatccgtcagggcgagcatgtgcctcacctggttccaagagtgttttattctgatacggaaatggcggttaccgtcatggaggatctctctcacctcaagatcgcaagaaaaggactcattgagggtgaaaactatcctcatctgtcgcagcacatcggtgaatttttaggaaaaacacttttctactcatcagattacgcgcttgaacctaaggtgaaaaaacagcttgttaaacagtttacaaatccagagctatgcgacattacggaaagacttgtttttacagatcctttcttcgaccatgacacaaatgattttgaagaagagcttcgtccttttgtcgaaaagctttggaataatgacagcgttaaaatcgaagccgctaagctgaaaaagtcatttttaacgtctgcagaaacgttgattcatggtgatttgcatacaggaagcattttcgcaagtgagcacgaaacaaaggtgattgatcctgagtttgctttttacggaccgatcggctttgatgtagggcaatttatcgccaacttatttttgaacgcactcagccgtgacggggctgacagagagccgttatatgaacatgtcaaaaaggtctgggaaacgtttgaagagacgtttagtgaatcctggcagaaggacagtctggatgtttacgccaacatcgacggttacctcactgatacgctcagccatatttttgaagaagcaatcggatttgcgggctgtgagctgatacgacgcacgatcggccttgcccatgtagctgacctggatacgatcgtgccgtttgataaacgaatcggcagaaaacgcttggcgctcgaaaccggcacagcctttatcgaaaaacgttcggaattcaaaacgataacagatgttattgaattatttaagttacttgtaaaggaatgatctattcatgacccattcatttgctgttccacgttctgttgaatggaaagaaacagctattaccattttaaatcagcaaaagcttcctgatgagacggaatatttggagctgacgacgaaagaggatgtatttgatgcgattgtcacgctcaaagtaaggggcgctccggcgatcggcattacggctgccttcggactggcgcttgctgccaaaaacattgaaacagataatgtcacggaattccgccgcagactggaagacatcaaacaatatttaaacagctcacggcctaccgccattaatttgtcatgggcgcttgagagactgagtcattcggtcgcaaacgcgatttccgtaaatgaagcaaaaacaaaccttgtccatgaagccattcagattcaggttgaggatgaggaaacgtgccggttgatcggccaaaacgccctgcagcttttcaaaaaaggcgacaggatcatgacaatctgcaatgccggctcaatcgcgacaagccgctatggaacggcgctagctccgttttacttggccaaacaaaaagatttgggattacacatttatgcctgtgaaacaaggcctgtcctgcaaggttcacgccttactgcttgggagctgatgcaggggggcattgatgtcactctgatcacagacagcatggctgcccatacgatgaaggaaaaacaaatttccgctgttatcgtcggagccgaccgaattgcaaagaacggtgatacggcaaataaaatcggcacatacggtcttgctattttagcaaacgcctttgatattccgttttttgtcgctgcacctttatctacatttgatacaaaggtcaaatgcggcgctgatatcccgatagaggaacgagatcccgaggaagtcaggcagatttccggagttcggaccgctccatccaatgtgcctgtctttaatcccgctttcgacattacacctcatgatctcatttcaggaatcatcacagaaaaagggattatgaccggaaactatgaagaagagattgagcagctgtttagaggagaaaaggtgcattaaaaaaccgctggactttgctcatttggagccgagtcagcggtttttttgtttctttttgttaacattgatgatttcatctttttgagcgcttgataagatatgcagtttcacaaacagttcggcaaaaacagcaagtttctcagagcggctcggcttcaattgctttgtcctcctttttcaccagaccaacttttttaacttaataaaatgatatgtcggccgtgaaaaaaagggaacgtgccatatgttttatttttctttataggagattcgctcgatgtttagcaaaaatgctttgatctccgttttgcttccggcgtatcctgttaacgcactgtttttgccgatcactctgtggcacgggacaaaaatcggcaggtcgttacgtttattagcctgtccgacagcgcgcaccgctttcggactgccgaccgcagcggcaatatctgcatagcttcgggattcaccatatggaatcctctccagcgccttccacactttttgctgaaaaggagtgcccttttggctgagcggcagggagaatgtcttcctttcgcctgcgaaatattcttgaagctgttgtttcgcttctgcaagattaggtgtttccatgtgctcagtattctgaaccgtttctttccaatccacccaatcttcctgactgagaaatagacgagtgatccggtcctcctcttcggcaatgataagttcaccgagcggcgtttcggctgtcgtatagtagttcattcatcattccttctttcttcagcattctgtctgacaggaagcgtaatatggaaaacggtgcccttcccttcttcactttctaccataatctcgccttgatgttcttcaataattttatagcttaccataagcccaagtccagttccccgttcctttgtcgtataaaacggttcaccaagtcgctttaatttatcttctgtcattccgattccctcgtcttttaaggagattagaacatgatcttgatccaatgcctttatcgttacaaaaatatttccgccgtcaggcatcacttcgatggcgttttttaatatattgataaaaacctgtttcagctgattcggttcacagtaaatcgggggaatgtcgtcaattaaatcaagttgcatttgtacattgctgagattggcttgcgcatttagaaggtctatcgtgtccctcataatttgggtaacatgtttttcctcatacataatggcctggggcttggctaaaatcaagaattcggtgatgatggattcgatgcgctttagttctgaggtgatcacgttgaagtaaagggcgtagtctccctcgacactccctttcagaagctgaatgaagcctttaagagcagtcatcggatttctgatttcatgagcaatgccggctgcgagttcgccgacaacatgaagggtatctgatttgcgcaggcgctcctccaattcttttcgctctgttacgtctttaaagatagccaagttcatattttgaataatattccgtttaaatgagaattcgagttttctgttatcaccgctgctcagcaaaaatggaatttcgttgtccatttcatcaaaattaatctgccttgccggtgatgccaaattttctatttcataagcagaaataatatctaacaggctgtgctgtttgatctcttcatgtgacaggcccaaaatatggcttgctaacgggttggcgtcgatgatcctgtattgattgtcgaacaatacattgccgtccattgagccgttgaacacttttctgaatttcagctcgctttcccgaagctccttttccatccgctttctgtcgcttacatttcttaagatcgtcaaatgctgattttcaaggatcgtccgttttgaagtaaattcaagctctttgaattgcccgttccccatttgaaacagcagctcttctctgatctctccgtattttgcgtatttcctcttcgttatgctgtatttctgctgcgagtcaacgagaaaatcacacagctttcttttcaacagcaaattcatcggcagctcaaaaattttacaggctgattgattcgcttttacgattcttccgtcattcgaccagatgatgatggcgtccattgcattttcaaagatttctctgaagcgctcctcacttttaaagagctgcagctccatagaccgcttctctgtgatatccctcataatggacatataaaaaccgctgatgatgtttgatgtaatcgtgaattcaaatagtttttgaactcctgaacgaagcttgacaggcagctcccccttcgcttttcccttgcggttgagcgccttccagatattgtcgaaatcttttcgtgagccgctgtctatgaactcatacaaagataaatgagacagctcattatgattgatttcaaagcttttacaaaaggacaaattggcatcaataaaaccgccatctttatcaaacaggacgattccgtcaactgctctgtcaaacaagtccttaaaaagctgttcattcatagagaattcccgctccagaatcttcttagaagatatgtccctcatgacaacaaaaaagaaatcctcgccaatacctcttttggccagaaactctatgtattttgttgccccgcaatcaagcctgatcggaacctccttccacagaaagccttttttaaaaaacttctttacggaaagattcagttcatcctttgggatggaaaacaaaaaatccaagacagaacgctttttcaaatcttccgagtcaacttgaagcatcctttctgttgcttcatttgcctgaacaatccgcatttcgttatcacaaataaaaatagcatcgagcgtattgttgacaatcacttgatgctgattcaattcctttttcagtcgcgcgttttcttctttgaggcgattcagttcctctcgcagctccgagtttgtctggacaccaagagtttccatgcatgtacactccttcttcaaaacctatccctcaatatttctacaaaatgcgggaacttccttcatttgccctataaatttcagaaaatttcagcgccattacattacgaagacattttctacgatccttaccgtcactttacatcgacctaacaatcagcatttttttagattcctttttcatcttttattttaaaatatgtaccagcagggaataatctcttagtgactgatgaaagagaaggtgatgctatgagtaaatcgcgggacagttatttcgataacgcaaaatttttattgatattccttgttgtattcggtcatatccttcgttcctttattaatgataatcattttatgctctacctctacaagttcatttacacattccatatgcctgcatttattcttgtatccggttatttcgcgaaaggctttaaacgggcgggatatgtaaaaaagctggcggtcaagctgattattccgtatttgattttccaaatcatttattccgtcttttattacattatgcaagatgaaagcatggcaaatgtgaacccgattgatccgcaatggtctttatggtttcttgtaagcttattcttttggaacctgctcctatatcctttttcaaagctttcaaaacagtgggcgctgtttgtcagctgcggaatcgccgtgctgatcggttatctggactttgtcagcagcacgctgagcttgtcacggacattcgtattcttaccgatgttccttgtcggtttttatttaaataaacatcattttgatttattgagatcaaaacgcggcaaacaaattgcgctcggagtgcttgccgcagtattcgtcatctgctggggcatcgattttgactattcttttctgtttggttcaaaaccgtattcttcatttggagacgttaccctggtaagcggactatcccgaatcggctggtatgtactcgcctttggggcaaccttcagctttttagcgcttgttccgcaaaaacggtatttctttaccaaatggggaacccggacattttacgtgtatctgcttcacgggtttattattaaaacattacggcaggtcgggcttgaggattggcttactgactatcaaagcttagtgatcctcttgcttttaacagcagccctgacatcagtcctctccagcaactttgttaagacagtcgctcagcccttcattgagctgaggatgaccagcttattgcaatttgtcagaggaacgggcaaaaatgcttatttaaaatagaaaaagcacctcttaagctgacgccgcctaagaggtcttttttatttttgttttttatttttgtttttttcttttttcttttcaggcttggtgacttccagcgtttcgatgatcttcccggcattgtaatccccaagttcacttgagaactcttcctccagcacctttttattcataggctttttatgattttgcatgtctctgctatgacggtttttcttcacaactacatgcctccctgctggccctgtttggaattgcggtttgcccctctaaaattggggtcgtcatgatattgtgtcttatatgaattggggtccatgctctcggtaggtgtattgttatttttaatggcttcattcacttcagctttacgcttcatacgaatcctcctcgccagttttcagacattttaagatgcaggagcgtaaattgcacctgtcgaagttaggttctccaactgaacaggaggcacacatcttttttttggcaatcaaaaaacaccgcaaaatatgcggtgttttgcctatccgataatcactctttctttcggatagtgatagttcgcttcaatttcctttcttccgatcagatacaggaaggttagaatgccgattcgcccgataaacatgacaatcataatgacgcattttccaacactgctcaaatctgccgtaattccaagcgacaggccggttgtaccgaatgccgagcacacttcaaacaaaagctccagcagggaatgcttttctgtaatggtcagaatgagtgtcgcgccaaaaacgagcaggatcgccatcatcgtgacaacaagcgacttcatcaagtcagcagggtgaagctcccgtttgaatacctttacggccttattgccgcgggcaaaatgaaacagcgcaagaaggttcaaagcaaaagtcgttgtccgtatgcctcccccgactgagcttggcgacgctccaataaacatcagcgcacaaataaaaaagagtgtggaatctgataatttgctgatatcgattgttgccagccccccgcttcgggttgccgttgattgaaacagggacaaaaacaaaatatcatgccatgattttcctgcgaacgcatggtttgcttccagggcaaagatgccaatggctccaaacaagacaagtgagccgaacgtaatcgtcgtgatctttgtaaaaagcgtaaatggataacgccgatgctttgaaaacaggaaatcctttacttcaacaagcacgggaaatccaatcgctccaaatataattaaaagcattgtaataaactgcacaaaataatcgtggcgaaatggaatcatcgaattaccggtaatatcaaatccgccgtttgtcgttgcactgatactggcaaaaaatccgtgtaaataggcttcctgataggagtcatagtaggttaagaaatatgtgccgagtatcagcccgccaaaaaattcaatccacaagatcagaaacagtacctgcttcatcagattgacaattcctgaaaactgggattggttttgatcaaccataatcagcttccgttctttcagcccgattcgttttcccatgatcagccaaatgaacgttccgagcgtcataattccgattccgccaaattgcagaacaaatgctaatataaaaatccctattgtgctgaatgtatcagctgtatcaactaccgtcagccccgttacactgactgaactgacagctgtaaaaagcgcatcaataaacgtccaatccgcccccggtttatgggccgccggcaaactcagcaatataacggccacagtaactgcaagaaaataatataatgcgatcagctgggccggtgacaaggcctgtatcaattttccaaactttaatctcatgtaaaatccttctgcctctctttttaagtacggtaattattctaaagatattaggtccatttttaaaggcttttacgaaacattttcttaacttgcttatttttttatgattttagtcaatggataaaataaaaaacctctgagaattctctcagaggaacaatgtgtttgtattatttagcttccagccgtctgattcgctcatctaaatcagggtgagtagagaaaagcgaagagcgcttcttgccattaatctttaacgtttggacagctgtctgatcgtcttccataatccgggaagaatagcttttaagcgtccgcagcgcatgaatcatcttgtccttgccggcaagatccgctcctcccctgtcagcatggaattcacgatggcgtgaatacgcaaacacaaccaggctgccaagtatcgaaaagacaatctgaaaaataatcattgcaataaaatgaacgatcggcgctagatcttctttgacaaaacggcttgctatccaagcagcgatacgcgataaaaagacgacaaaggtattaacgataccttgtaaaagcgtcattgttaccatatcaccatttgtgatatgcgcgacctcgtgggcaagcacaccttcaaccgctgcgtcatccatctgctccagcagccctgacgatactgcgacaagtgaacggcgttttgacggtccagtcgcaaatgcgtttacttcaggtgaacggtaaatcccgacttccggcattttcgttaaaccggcagagcggcttaatctgtgaacacgatcaaccaattgctgttcctcatagctgagcgagtgttttttcggattcagcactctgacgcccatcatcgtctttgccatccatctggacatcgcaagagacgtaaaggaaccgacaaatccaacgactaaactgaacacaagaagcgccattggatcgataccgccatcagctgtaaaatacgtcccgactcctgtaacagagcttaaaacagacaaaacgatcccgattgttgtaagcaccaaaatattcgttagaataaacagaaaaattcttttcgccataacaacctccgttattttaagttcaaaagaacccgtatatttaaattataaaacatccatttgaaaatgcaaggaattcgacgtatgatgttaatgtaatttgctgacgcttgaactttgaacttatacatagacctatatccgcgtcaaattgtttaaagaggtgaacaatgaacatttttaaactctctcgaaccgatatggtgcggctgctctattccctaaaaggacaaggagaacatagcccgctcgacattctcgtccaatcagcgaacatgtcagcagaaaaagcagccaatcatctagaaattcctgaatttcttacaagatatgaacgaaaaaaacagaaaaaagaatacggtctttctacaaatgaaatcgtagagcttggcaacttatgcgagctgacttcgttaaagtcaaccgcgattcaaaactgggtaaagcgtgatatcaaagatctgatcggacaccctgagctaggcaaaaaatactcaattgaacaggcagttattcttttaattgtacgtgatttaaaatccatttatgactttgaacacatacgggctattttaaaagtggcctttaacacaatctcagacagatctgatgatgtcatcagcccgattgcttattatgaaagctgcgcatatgtgcttgatgccatccatcaccaagatactccttctatgaaagaatccaatctacaggagatcgccgaacaggagacagagcgtctccgtcaccgttttgaagaactgaatgacggccaatggcttaaaatcagacaaattatcgccattacagttctctccattttgacgttccatattcaggcaaccgcacataaaatgacagcagacattctatagtctgcgtcaccccggctcagaggccggggttttatttttctccacaacaattgccagcataaataaaccccgtatatttcaaactaaatacgcgttaagaatttctttatcgaaaaaggagatgaaaaagatggcgagcagaaataaactcgttgttccaggggtggagcaggcactagaccaatttaaactcgaagtggctcaagaattcggtgtgaaccttggttctgatacagtcgcacgcgctaacggctctgtaggcggagaaatgacaaagcggctggtacagcaagcacaatcacaattaaatggcacaactaaataaattcaggtctttattcgccgggggcactcggcgaatcttcattttgagctgaattattatcactgctgtagccgtttggattacgtcggtctgaagcgttatcccttctggacgaagaacggttcttgccttgttcaccattgttccagtccctgtgatattggctttgacccttgtcagcgccgttattttcatttcctttatcttgaggatcttgtattggggtttgctcatggtccccatctttttcggtatttgtattttcatctgattcctttatttttttatctttgtcactatcatcaatctggtcatccgctttatcttctttctggtctccggaatccgcatcattcagctgttcattatctccttgcttgctgtcctgggtgtcagtttgatcgttgttttcatcctcattttcatcactcttttgatcctcttccccggatggtttgctggagtcatcttttaaatctttattgtcattcttttcatttgatttgatgtagctgcctgttgagacgccttctttcttcgctttttccctcgtttgcatatctgactcgagagattccatgcggtatgtcgttttatatttttcagtcacatcattcagctgttttttcacagcctttttatatgtattgtcttctgtgttttcataaacagtggaaatcaatatttctttcgatttctttacatacccgtgttcactgcagtcggttataatatcgtcaatcacctttttaaaatcagtcttctcccaatcatctatatcattcacgactttctgtccctcatcgtttagaggcgtcagttcaatcacttcataatcgctgtttaacgccatttcgacgcttggattgatatcaattgtcatatacgcataggccttattattagaaaaaacggggagaactataaaaataaagagcataatagcagtcatcgtaaaaatccccattttgaaagggcgcagtttaaaaaaatcaaaaaagctggcccttctgcccatgcgtgtttcactcggaaggatgatttcttctccgatttcatagctgtgtcgatcatttttggcttttaaaaattgtccgtcaggggtcagcaacgtgacgaattttttatttttctctactataatccctcttctcatgagtgcagcacccctttaagataatcttttaaataaatataatcacccgtaatgataatacacatcgcaataatatattttctgtttctctcaatcgtttttcggcttacagagacaagctgttcaagctgtttgaccggaagctgcttctttgtatacaggatagcggccaattcttcatgttcaacaagcgtcattgccacctttatggcgttttgccttgcatccgtgtgctttggagaattttcaagcagttctttaaacgataaaccataatccttgagctgcttttgaaaatagaggatttcctcccgcctctgctcctgttcaatctgacggcggtattcatctatggaaagctcggcttcaatcaggctttgtgatgactcctgatcgtctccttcctgtaaatcgatatttatattttgtgcgcttctggcttcttttctaatgtaatcaatgacttttctttttataataagctcagcaaatgcgagcagagaatttcctttttcaggtgaatatttttctatagcttcattaaacgcgatcagtccaatactgaactcatcgtctttttcatctatatatcgtttacaaacggatgaaaccgtctttgcgataaatggcttatattgctgtattaattcattttgcagatctttattgcctttttgtatactctcaacagctttttcaagtgtttgcttcttttttcccaatttaaacaaaaggctaagcactggtttcacctcagttcctccctataactactcattaatgatagctaatttgatagggattcgcaaaggagaaaaagaaatattgatttccaatgtctcaattatgacaaaccattctgacgtcctatacatgatttcgtgcctttctaaagaattaagggggttttatgcgtgttttttgtaacaaagatgttataaaaatgttattttatttcgcttatgaaaacgcttcaaacacaaaaagactctgcttttaagcagagtctttcagattacgcccgttcacgggtgctgtttttttgttcgttttgtgcgccctccggctgttttttcccacctgacataaaccagccgcaaaccgcgattgctgctaagacaccccagaatatcagcttccatgttccagaatgaataaagtgctcagaaacaaccgctatgtcgcgatgggcaagcgtatataaagcaagcttcactccgacccagccgacaatcacaaaggctgctgtttctaggcttggacgttcctttaataacttcacaaacatggaagccgcaaaccgcatgatcaccagtccgatgataccgccggccaaaatgacgagaaattgtcctccgtcaagtccgccgatcttcgggagtgatgtcccaggaagtgtaaccgccagcgctactgctgctaagatggaatcaacagcaaacgcgatatctgccagttcaacttttaaaacagtcggccaaaaaccgctttggttcgtctctttatgtgtgtcttctttcttaaatacatatcttttcaataagtggcttgctgagatatacagcaaataaatcgcgccaatcgcttgaacctgccatacgttgaccaaaaatgaaatggcgaataaagagccaaatcgcagaacaaaagcccctgccaatccataaaataacgctttttttcttttttcctccggcaaatgttttaccattaccgccataaccagcgcgttatcggcggctaaaatcccttccagcccgatcaagacgagaagaacccaaccatactctaataataatgctgcatccataaatgataccctcccaaaaaagttgttttctttctcttcatccgatcttatgccggccggaccatgcaaaaaagacctttgccgacataaggcaaaggtcttgctagacatgaattcaggcatgccaacaaagccgatggatacaatccatgaaatgacgactttgtttccggaagacattccggacgctactcccctttgggatttcaagaaatatgattttatacgtcaatgatatgcgcagcgcaatgatttgtcaacgcttattttttaaaaatacagataattgttcggaatgcgtgcgtttcttcctctttttcatcagtaagtagagcaggaacagcgccaaaatcgctatcccgatcggaagcatatattgatcaagaatagagccgacttccttccaattttcaccgagcttcacaccgagataaacatatacaaatgtaatcggaagcatagcaatgaatgtataaagcgaaaacacccaaacattcatttttgcaattccgcacggtatggaaatcaatgtcctgatgccaggcaagaaacggccgctgaaggcgacaaagcccccatgttttttgaaaaaattatctgacttatcaagcgcttcaggtttaataaagagatacttcccaaaacgttcaagaaacggccttcctccgtaccggcctatccaatacagcgtaagcggaccggccactcctccaagcgatcctgccaaaacaacgccggcaagtgtcatatcgcctttagatacccaatagcccgcaagcggcaagacgacttcggccggaataaactcaatgctgagcgctagaaatattccaaaataagataagcttttaaatgcttctatccatgacataaccagctcttcgatagccaccaactcccttgtttcatgtttatgtatcatacatttttgttttttcggaaaacgtcaagatgattttaacacatttttcacggtcagttgaactaaaaatagatctccctcgtatttctatcgttttgaaggctgaaactctgcggttaagcagccgataataaagagagtcaacaagactggaacacacgatacgggggggggggaatctccatttggaaatacacgttacgtataatacgacgctcatatgtttatctattctaattgcctgtaccgcctcgtatatttcccttgaactttcaaggaaagtcaccatcaatacaggcttaaaaagtaaaatttggctgatcggcggctcacttattatgggattcggtatttggtcaatgcattttgtagggatgatggccgtccatatggaaatgccgatggaatatgaattcatgcctttaatggcagccattggcgcatctgtttcgggatcatttgtgtcattatattttgtcagccggcacattcttacatattacagactgcttaccggatcagttgtgcttggcgcatctattgcttctatgcactatatcggaatgtctgccatttcccgggtaatgattatttacgaaccgattttatttacagtttcaattatcattgcgattgcagcctctttcgtctcgttaaaaatattctttgacttggccgtaaaaaaacattctgagcatcttatattctataaagtcgtcagttcaattgtaatgggcattgggatttcgggcatgcactacacagggatgcttgcggcaactttccataaggacatggctccgcccggaagccatatggaggtgcaaacgtttcattggtcaatttttgttactttaattattttttgtatccaaacgttattgttattcagttcccatgcagatcgaaagtttattaaacagagcgaacgcataaaggataacgaacagcgatttcagtctttaatcgtccacaatattgatgcaatttttattttatcattagaaggagacataatatcttccaatcacgctggtgaggaaatgatcagcaaatttggcttcagcatgcatgactggaggaattacacatcactgaaggttaagcgcctttttgagcaagttaaaaaagataaacaagcgatgaacagcgatagcgatcttatcactgaaaaaggccagtttcacttaaatattacgcttatacctgttgaggtcaatcaggaactagacagcatttatgtcatttgtaaagacatgacgaagcagtacaaagcagaaaaagaaatccatagaatggctcattatgattcgcttacagacttacctaacagaaggcatgccatctctcatctaacaaaggtgctgaatcgcgagcattccttgcattataacactgttgtattctttcttgacttaaaccggtttaaagtgattaacgatgcattagggcataatgtcggtgatcaattgcttcagtttgcagctaaacgcctgtcatctgtagtccctgataacggatttatcgcccgtcttggcggtgatgaatttattattatattaacagacgccaatacaggaacaggcgaagcagatgttttagcaagaaaaattatccaaaaattcaaaaaacctttcaaaattcaagatcacacccttgtcacatctgtcagtatcgggattgcgatatctccaaaagacgggacggatggccttgaattgatgaaaaaggctgatatggcgatgtatgcggctaaagaacgaaacaaaagcaaatacagatactattctttttcaatcggcaacaaagaaaccgttaagcttaaccaagagatggtactcagagaagcaatcgaaaacgatagatttgtcttgcattatcagccgcaattcagtgtgaaaaaacaaaaaatgacaggagcagaagcactgatacgccttgtgacaccagacgggcaactgcgtccgcccggagaattcatcggtgttgcagaagaaacgggacttattattgatatcggaaagtggattatagatgaagcatgcaagcaggcaaggatttggcatgacaaaggctatgatctttctgtcgccattaatatttccgccagacagtttcaatctaaaggtctgattcccctcatcaaggatacgcttaataaataccagcttcctccgcagcttcttgaagtggaggtgacggaaagcatgacaatggacaatctcgatcactccaaaaaggttttgtcatccctaacagaattaggaatcagaatcagtattgacgatttcggtactggtcacagctctcttagctatttgaaggacttcccgattcacaggctgaagattgacaaatcatttattgacgatattcagacccatcctaaatcagagcaaattaccggagctattattgccatggggcatcagctgtctttgcaggtgattgccgaaggtgtggaaaatgcagctcaaaagcagcttctttttgaaaaaggctgcgaccatttgcagggcttctttttcagcaggccaatacctccggaacaattcgaacaattcattattgaacagccgtcgcaataacagcgccggctttttttcacccataagttactacacatgaatcgtactccttctcttcacactaaagaaaaaaaggggtttatcgatatgcatacaatgtggaagggatcgatcagcttcggattagtaaacatccccatcaagctatatgcggccacagaagataaagatattaaactgcgcagcctccataaagaggatcacgcaccaatcaaatacgagaaagtttgcacaaattgcgaaaaaactcttagtcctgatgaaattgtgaagggatatgaatatgtaaaaggaaaatatgtagtgctgacagacgaagatttaaaaagcttaaaacaggagcatgaggagaaagcagttgagattgttgactttgttcagcttcaggaaattgatccgatttattttaaccgctcctactttgtcggccccggggataatgggacgaaggcctataccctgctgcgtgaggcgctgcgctcaaccggaaagatcggtatcgccaatatgacaatcaggtcaaagcagcagctggcgattctccgcgtttatgaaaattgtatcgtcatggagtctatccattatcccgatgaggtcagaagcgccgctcaagtcccaggtgtacctgatcaatcgaatgtaaacgataaggaactgcaaactgctatcacattaatagatgaactgactgctaagtttgagcctgagaaatatgaagacacgtaccgacaggcgctgctgcaaagagtcaacgacaagctagaaaataaagaaacggctgtcactcctgataaagcgccacctcgtgaagatgtcattgacctggtaagcgctctgcaagccagcatcgacagaaccagaaggccgaaccgggagacaccggctgccgcacctgcacaagccgctgaaccgaaaggagccggagataaaaaacaaaaaacaactagaaaaaaagcctccggcacatcatagcgcatggcgtttaccatgcagccggtcttaacttcgtcaccgccaatcggagcagaatggcgttacgaagtaaaatatgatgggtaccgctgtattctccgcatccattcttcaggtgtgaccttaaccagcagaaatggtgtggagctcagcagcaccttccctgaaatcacacaattcgccaaaactgcctttcagcacctagaaaaagagcttccgctgacacttgatggtgaaatcgtatgtttggtgaatccttgtcgtgcagattttgaacaccttcaagtgcgggggcgtttgaaaaggccagacaagattcaggaatcggcaaacgcgcggccgtgctgctttctcgcctttgatttgttagagcgaagcggagaagatgtaacgcttctttcgtatttggaccgcaaaaaatcgctgcgtgaactcatatccgcagcaaagcttcctgcatctccagatccttacgcaaaagaaaccattcaatccattccctgttatgatcattttgatcaactctgggagatggtaataaaatatgacggagaaggaattgtagcgaagaaaacaaacagcaaatggcttgaaaagaagcggtcgtccgattggctcaaatataaaaactttaaacaagcttatgtttgcataacagggttcaaccctaacaacgggtttctgacggtatctgtgttaaaaaacggaataatgacaccgattgcctctgtctcgcacggaatgcgcgatgaggaaaaaagcgctatacgcgagattatggaacagcacggacagcaaacaccctcaggcgaatttacgcttgaaccttcgatttgtgcagctgttcaatacttaacaattctccaaggcacattaagagaggtatcgtttatcggtttcgaattccaaatggactggaccgaatgcacatatgcgcaagtcatacgacactccaaaccggttcacccaaagctccagttcacaagcctggataaaatcatatttgaaaagaataaaaaaacaaaagaagattttattcagtatatgattgaagtcagtgactatctgctcccatttctgaaaaaccgggctgtcaccgtcatccgctatccgcatggatctaggagcgaatcatttttccaaaaaaacaagccggactatgcgccggattttgttcaatctttctatgatgggagccatgaacatattgtctgtgaggatatgtctacattgctatggctttgcaaccagcttgctttggagtttcacgttccttttcaaaccattaaaagcaggcgtccggctgagattgtcattgatttagacccgccttcgcgagatgactttcttatggccgtgcaggccgcaaatgaactgaagcggctgttggattcctttggcatcacatcgtacccgaagctgtccggcaacaaaggcatccagctttatattcccttgtctcccgaggcatttacgtatgaagaaacacgccactttacgcagctgatcgcagagtactgcaccaatgcatttcccgagctatttaccactgaacgcttgattaaaaacagacacggcaaattgtatcttgattatttgcagcatgcagaaggaaaaacgattatctgtccctattcgacgagaggaaatgagcttgggactgttgcagccccgctctactggcatgaggtgcaatcatctttaacacccgctctgtttacaattgatacggtcatcgatcgaattaaaaagcagggctgcccattttttgatttttaccgcaacccgcaagacgaaccgcttagcgccatattgcatcagttgaagaaaaagagctgactaatgaagtcagctctttccgtgtttaactgtactttttttctaaccgctctttttcctggcgctgaagcgggctcagctgttcattatacaaatcaatatcgatcgcgtatttcggtcgtcttttcacttcagaaaaaatcgttccaatatactctccgatgatgccaattcccatcaattgcagcccgcccaaaaaccaaatggatatgatgagagacgcccagcctgcattcgtatggccgagcagcttttgaataaacgcgccaatccctgccacagcgctgaggaaaaacaaaacaaaccctaaaagcgtaaagaatcgaattggtgcgacactgaatgaagtaatcccgttaaaagcgaaggatagcatctttttcagcggatatttcgttttgccggcaaagcgttccttgcggtcatacaaaacttcggccgatttaaagccgatcatggggacaatacctcttaaaaacagattcgcttccggataacgctcaagctcttcaagggaccttttattcattaaacgaaaatcagcatgattataaattaatttaatcccaagcttattcatgagacgataaaaccctaacgctgtcgtgcgcttgaaaaaggtatcggtttttctgctccggcgtacaccgtaaacgatctcgcagccctcatgatatttcagcataaaatcccggatcacagagatatcgtcctgaagatcggcatcgatcgaaatgacgcagtctgacctattcttcgctttatgcagtccggctaaaagcgctttttggtggccgacattgcaggctaattttaagccggtaaccttcttgtttcttatgctctccatagcaatcaaagcccaagtgcggtctttgctgccatcatcgacaaacagaattttactgtcttcagcaattaatttttcttcaattaaatcatctacaacctctgtcagctgacggcttgtttcttgaaacacttcctcttcattgaaacacgggacgacgatggttaatactggctgtgactgtttcaatcgatatcctccttatcttgtttcatataaataaatgcgccaggcggaatctttatggtcaaacgtctttacgagcgcgagatggttttgttcagcattcatgatcggaactgaagaaaaaatgtaccgtccgcccatttttttaaatacatctgtatttaattgaaggttgttgatcgttttcttcgagttctttttgaaatcatatcgtttaccgagttcatcgacaaaaaggtagcagcggctgccccattcatcaaagtattgtttcagccgagaatttttttccagctctttttcgatgattttcctaaattcatatttatatgaaagcggatacagattgttatacgtatctaacgtataaaacccgttatattgggcgatagacggatgcagtccgatgctcgccaccctgtacgaatcctgcggacgtccgatatattccttaatctctttgaattgctccgatgcataaaactccttgaatgtcggcgcgttgtaatgaacgccatacgtatattcttcattaaaaggcgccaacaccatcagctgtgcagcgactgcggcgtacacaagccatttccatcctttccccatccgccaaatgagatataaagcaagcgcaaagctcacgtatataacaagcggccgaagaaaatgaaaacgggcaaaattaaattctgctaaaaaggcaaatttctgctttggaacagcccaaattttgttgaaccaaaacgcataccataatgacaatccgtaattaagcacacataaaaacagataaacattttctggctttgtccgatttcgtttgaacagcagagcagcaaatacgaccagcaggatcggaaggatgacaacggtatgaacggtcatcacatgattatggccatagacaaagttttttacggatagccgaagagaatgccaaacgtcatgcctggatgagataaattcgatacgatgcatcggtgcgtgttcaaacagcatcgaatagacaagccgatattcaacgaaaagatagatactcgtcataaatgcaatactgcctaagaacatcaaattccatcttctttttgtaatggcatcatacagccaaaaacacgccatccctgccaggaaaaagaagaagcctagaacaaagcttgagtatagagggagcaagcccagcgtcagccactctctccatgagatatccccttttcggatatttaaaaaagcccacagtgccaaagggtacccaagcgtactcagcattcccgaaggccagaacggtgttaaggcaaatgcaagcgatacgccaattcggatgaaagccgcttttggttccgggattatatgtttcttcagcagcacatacattccaaaaaaagcgacaactcttgtaaccgtctggcttattgcataggcggtcatggaagaaaagaaagcatggagccaaacaattccgctccactcggtgccaaaggcatcccggggcagcccgttaatgatttgcggaatggcagcgtcaaccttgccgacgatttctccgctatcggccagaaccttgtaccaagcgatgttggaatctaaattatcgtggacccggatatgggcatcttcctttaaaataaaaagcggggatacatacaataaaagaagaaataatgcgatccagagataatatgtttcttttttttgttgtctcatcaatcgtaacattgcttacacatccatttgttattctgactccgtcggcatgttctgcctcatgtgtcaaaatttattatcccttttcccttccaaatcattcatcatatgacaatccgtttttcaacctgtctctacccattaattcccgctatccatagggcttgatcacttactatactgatagaagggaggggatatattttgtttacaatcttactttcattggccatactcgtatttgtgccatttctatataaagcgaaccgcaatacaaaagatgtgaaagtcaacaccatttcaatcgaccaaaaagacggccttccagccagaaaaaaattaaatatccttcatttatcagatcttcacttggaaaacatttcagtctcacctgaggagctgtatcatttaacaaaagatcagcctgtggacatcattgctcttaccggggattttcttgatcggaaacgtaatattccgaagctggcaggttacttgaacgccttgcaaaagctaaagcctgcatatggaatgtacgcggtgttcggtaaccacgattatgtattgaaagaagaggactttcggagattgaagcgagttttagaggaaaacggctgtatcacgctgcaaaatgaacatgttcgaatcgagacggctgcagggcctgtcaatattattggcattgatgattacagtacgaatcggagtaatatcaacggctcttatcaaagtctggaaaatggctatcatcttgtcttaacacatgacccaaatattattctggatatgaaagatgttcattatgattacctgctgtcagggcattttcacggcgggcaaattcactggccaaaaccgtatcatttggtgaaaatgggaaagctcgtgcgaatgaacatgattaaaggtcttcattatcatcacgataaaccattttatatcagcgagggcttgggacaaaccggcgtaaatatccgtgtcggaagccgtcctgaagtgacatatcatcagatttaatcaaaaaagactgtgctgaccgaggcatcagtcttttttttgataggttttctgcagcttttcttttgagataaacaaataggatgaattcggtaaatgccgcaagctcacaggctttgaagtcaaatataaaatcggcacatgggacacttttttaaaacatctgtaaaaaggattcaccggggtgatcacatcaaagccgagcctttccacacctttgtcaagcattgtaatcccaatgattcctttgattttctcgctttttttatgattgttaatatagtcaagaagaagcggcatcgattgatatactttctgataaataatgattccctttctgactgcgctctcaatgctttgaagctccctgatcagctttatgttatgcaggtggattttaacgagcacatcattttttcttatatgcgttccgtcgctaagcacgacatgatgtcctttgtacttcgtcagcctgactcgaaagacgcttttacgatctttgtcaaccaaggtcagccttgaaaaaaagaaataaatcgggtcaaccactctccatatggaaaggaaacaagttttcatcttttcaccttccttatgatcaaaaacacccttatattttgtgaacgttctcctcaaaatatagttgccatattttttaggaggaccgtcatgaaaaacattctcatttttccttttttaagcatttccaccggccatcatcatgtggctgatgcattgcaggctgaattagagtctcaagggcaggcagctgaaaagattgatatcttttcacatgcgtatagccggttagaaaaattgtcctccgtggcttatttaaaatggattcaatatttcccgaaaacgtacagcggcatttacaggctcctcgcctgcggagaatttcagcatgacaaacgctatttcatgtacgaatggctgttcacacagcaaatgaggcacatcctccaagaaaaacagcctgatatcgctttctgcacacatgcgctgccttcttatctgctgaaccgattaaagcctgaatatccgaatctgacggttgtgaatgtatacactgattttttcgtgaatcaattatggggacggaagaacattgattaccattttgttccgagcacggaagtaaagaagcagctaatatcagaggggatcgatcagaacaacatatacttgaccggcataccagttcaccgaaattttgaaatggaatcagcagataccttgcagcaccacccgccatataccatcatcatcacagggggcagtatgggggtcggtgggattttaaaatgggtgcaggaactgtcgccaggcggaaagatcttatacaaaatattatgcggcagaaacgaaaagctctactcctatgtcaaaagtttacaccaccccttgattgaggcgattccttaccttcacagcaaagcagagatgaaccgtttgtacgaacaggcgacaggcatcatgactaaacccggaggcgtgaccatcagtgaatgcttacagaaacggcttccggtatttatttatcatgcactgccgggacaggaggaaatgaatttaaaccttctacatgaaaggaagctcgtcacagatatgagaaactgggacatgcagaaagcagaagagtatatcgcggcattttttcaatcgaacgaacagatgaaggagtataaaaaacacgtcattggataccttggcgaaatgtctgataggaagattgaagatgttttaaaaagaatcatatggaaacaaaaaaacactctcctgaaatagagagtgtagaatagttaacgaaacagcaaatgctggctgtgtatgcctgctttcttgagcaggacgatcagctggtcctgttcatcaggcgaaagacctgaaaacgctctcgcaatacgcagtgcatgaatcggataaattttatccaaatactcatttcccttgtcagttaaatgtgcgtaaacagagcgtttatctttcgggtcctgctcccttactaaaaacccgtttctttctagtttgtcaataacatatgtgacgtttccgcttacaagcagaagtctcgacccaatttgctgtaatttttgcgggcctcttgtgtacaggagctccagtacagcaaattcagtgggattaaaaccgtgctctttgctatcacggatactatgttcggacacacttttgaaagcccttgcaaaaactctgtacaaattcatcgcacgctcaacttcttcttcgttaaacgataatctcatcatatctacctcgtatataggatttttataaaaaaataatgaaaacccttacatataataagagttcagtcccttactatacgtattcgctataattcgagaaattccttctaaaagcaaaaaaatccttatacattatcttgtataaggataatttttatgatttgtaatgcttcgaaagaaataagcgtattctttccgaagctcagaaatcgtcattttgttcatgacctctttattataaaccccaatctgatagagtttttcagaataatggcgtcgttctttttctaaagcggatttcaataaattactcatagcgtcctccttcattttgaggtatcctatacaaaagatactctttttaaatgaacgtggtatgaatctaatgtaaagaatttatgtttacgaagattttcggtattgtccgttttgaaccgatcttaataattgaaaagcctgttctccggcaagctgcataaacgtctccagcatttcatcacgcttgatatccaactctataatttcttttgccagtgagaccgctttttcttcctccatgattatccttcctcctcgtttgttcgttacataaaggataaaacgcgcttgagtgttacgcattattcttgttaatttttcttccgtattttttcaaaaatcttctatttgatgttagaaaatatgacaagcgtcaggttttttctctttgttttttatatactattatcaaaagacatccaggggtggaaaaatgaccacagaagatcattcttataaagacaaaaaagtgatttcaatcggaattgtgagtgaattgacaggattgtccgtaagacagatcaggtattatgaggaacgaaagctcatttacccgcagcgttcttcaagggggacaagaaaatactcctttgccgatgtggagcggctgatggatatcgccaataagcgtgaagacggcgtacagacggcagagattttaaaggatatgcgcaaaaaagaacagatgttaaaaaacgatccgcaagtgcggaaaaaaatgctggaggggcagcttaatgctcactttcggtacaaaaaccgttaaataataaaagtccggctcgcagttgagacggactttttacgtttataatgagtgaatgaatgcagtggcaatgccaaagtagattaataaagataaaatatcgtttaacgttgtaatcagcggtccagaagcaatcgccgggtccactttcagtttgtgcaaaataatagggataatcgttcctgacatcgtgccgatgattaaggttaagaacagcgaagaggcgacaacaaatcccaaaagcgcattcccctgccatatgatggagacaatcgcaatcagcacagaacaaaccgctccgataaaaatacttgttctgaactcccggaagatcaggcgcacaatcgtttttttgttcatttcttctttagacaaacctctgatgacaaccgcaagagattgtgttcccgtatttcctgtcatccctgacaccatcggcatgaaaaacgcaagcgctacaacctgcttcagcgcatcttcaaaatagctgataatgcttcctgaaatcagtccgataaacaagagtaagattagccatggcaggcgccggtatgccgccacgtaagcttttgtgtcaaaggtgatgtctttaccggaagcggcaaatttttcgtaatcctcatcagcttcacgaataacgacgtcgataatatcatcgactgtcacaatgccgacaagcacgttgttttcttctacaaccggtattgccaaaaaatcgtaacgttcaatcaggcgggcaacttcttcctggtcctgaagagcatctgctgatatgacgcgggtaaacattaaatcctgcaccttttcttcaggttcacccagaatcaaatcgcggtaggaaagaaccccaaccagctgtttgctttcattaataacatataagtagttgatcgattcagctatttcagcgaagcttttcagtttgacgaccgcgtcttttaccgtgtaatgctgagggatccacacataccggtttgtcatcatgcgtcccgctgaatcagccgggtaattcatcaagagctgtacagcttttgactctgacgcttccatgctggacaaaagctgttccttcagttcttcgtccatttcttcaagcaattgagcgaggtcatcgttgtccattttgttcatcgccagtgttgcttttgtttttccgactttatttaagacgacaagctgaaattcgcgttccagctccccgatcatatcagtgatatcgtctacagttaaataagataaatagcgggcgcggtgtttttccggcatttctttaaaaataaatgccatgtcatagggctgaagctcatcaataacacttctgaaatccctgattttcccgtctctcagtaaaataatgatgcgtaaaatgagttcgtcataggtcatgttttgaaccatcgggactcgtacctcctctacggagacgtgccggcctcgccagaaggtgcggcagttcgtctcctcatcgtgtaatcaattgtcttgctgtcatagtatatgggtacttcttcagattgactcgaatggggagaatccatactccgcacctcctttgattggtttcgttttaaaggcataaaaaaagccttcgggattgaaggtgaaagaagcacggcaaaaaaagcgtgcgggcgccttcaatcgtagagctttagcactgtatggcataggacaagcatccagctgcattaaaaatcaccttatgtcgatgatttctgttgacccattggcgtctttggacatttttgggcagcagcgtatctccatacaggagcctcacctaacgaagttcctaattgaattgacacactgagattacagaaaaaaacaagctgtgtcaactcaaaaaagtaataaatgcgcttacatcacaattacggaacaaaacaagggcctaagcccttattctgttgtttgtgtctcgtcatcttcagaaagcaaatgatacgtttcatgaagaaataaggcatactctccttccttcgtcggatgagggacatattcagcctgattgatgtattgctcctctttcttttccatgcgtttcgcctccttttctacttagattgtccaaaagaaggtttcttatcatgaaaaacccccgctgcagcgggggttttgattagtcatctatctcctgtttgataatgcgtccatcttttgcggaaatttcaaattctgtctcagttccttgtttcgtttggatttccatttcatagatgtaagcaccgtcatcttcgtcaagcttactttctgttacggttccgcctgtttgctttaaagcaatttcttcagcttcttctttggttatggcgacttgttctgctttctcctttagcgggtcattaagcgcttgttttgtatgaatatctacataaacgtcgtagtcttcaccttctttttcaatctccacttcatagacttctttgccgttgtaaaggtctctgtcaatgtcttctactgtgccgtcaacaactgttttagcaattgcttctgcttcttgttcagtgagtgcatccgtcttagaagaagcctgtctgttttcattgttttctttggcaaacgcgttgtagctgaatcctccggccgctaggcatcctgctaaaagaccgaccatccattttttcttgagcatttgtgagtcctcctttgttttgtatgagtacagtttacacactcaacatgaaaggaaaacgagagcaagatgagaatttgatgagaaaccgtcagtcttcatacacaatgttagctacctttcctgtgtaggcattgattttcactgtcgcttccttatcatcaggaagatcaacgtccacttcaaagatgagagtgccctcactttcttcgagatctgcgtcatccgctgtaccgcccgtttttcgctctgcaatagttttggcttcttttttcgtaatcggcgttttttgttgatctttgctgctgatttgatcggcagacaagactgtttttgcctgcatgtctaccttcacttcgtatgttttcccatcttctttttgtatggtataagtggcaactcgactttgccgtgtttgttttttgaccgttcccggcacccgctcaagcgcgagatgctcggcttctttttctgtcatggcagatggattcactgcttttactctattcattgaaagaatgtcagccgatattgcgtctgcttttacaaagtaagttccctttggattttcaagggttatatcatatgtttttttatcctttgattgtgttgctttcgtgaccttgccttcataagaggcttcgactttttttacgacagtctcctttgacaatacgttctcatgggtttgccgaatgatgagaaacgtacagatgatgactactaaaatggctgctgcagcaaaagatactgtttttattgttttagtcatcggcctcccccattctgttcgctgaattgcatggtgacagctgttccttgtcccggcttgcttttgacagacagctcaatgccatgctcatcagcgatttgcttggcaatggaaaggcctaaacccgttccgcctgtttttctgtttcgtgcctcatctgcccggtagaaccgttcgaacaaatgcgggatatgctcctcaggtattccgataccttcatccctcactgatagaaatggccgtccattcctcgttccggctgacatctcaataggcttttcactatactttattgcattatcaagcaaaatggtcaacagctgcttgatgcgttcttcatctgcctttacaagcaggctctctttatctgtttcaagcaatatgtcacgctgataaacggactggagcgtttgcataaccgcgcgcgccgctttaatcagatcgattgttttcagatcaacctcgagtccttgatggcttttggccagcgccaaaagctgattggtcagttttttcatatgcaccgcttctgagtgaatggcttctatcgactcctcaagcacctccggcttttttgccccccatcgcttcatcaggctgctgtagctttctataatagtgagcggggttttcaattcgtgtgaagcatcttgaacaaattgctgctgtttatcatagtgctccttcagcatcattgccatttcattaaatgtcagccccatttgatacaattcatcgttggactgttcttctaaagaaatcgttttaaattctttgtctcgctgtatgtctttcattgtgatcattaatcgtctgatcggattgatgattcggcgggctagcaagctgcctgcaaaaaaagaagcaatgcagacagcagcacttgcagcgattaagatgattttcagcagaaacagactctcttctgtgttctccagtctttcaaccagctgaagagacacgacttgtccatcggtccaaatcaccggaacagcagcctcggcaaacagcttgccgtcatgtttcctcacatctgccgtttcgccgctatgaaaagagagaggaaaatctttataggctttttcttttgtgatcgtcataacggctttttgatcaccattcactacacgcaccatgccatttgccggaagataggcctgcagcatatcctgcaaagccactccttctgtttcagcggcacgcagcgcttcggcaatgttatccgtctcatcagcaagccgggccgcatcctttgatgtcagcgcagacgaaaaaatgagatatactgcggtatgaaccaaaattaataaaatcaacagtgatatcgaagtgtatagatgaatcttggtcttcagcttcatcgtttaccccttaatggcatagccgaccccgcgaatcgtatggatcagctgtttttcgtaaggatagtccagtttttttctgatgtatcttatgtagacgtccacgacatttgtatcaccgatataatcaaatccccatactgagcttagaatttgctcccgtgtcagcacttgctgcggatgctttagcatatagacgagcagatcaaattcccgcggcgttaattccacctctttgtctccgcgtctcacttcacgggttttttcgttcacccgcaaatcgtcatatgtaagaaaggtgccgatatcttcagtttttgttccattttgccgcagcgccgccctgattctcgcaagcaattcctcgatttcaaacggcttggtgacatagtcatttgcaccgatgtccagacctgttaccttatcaggaatactgtctcgcgccgttaataatatgaccggtgtctgcgaatccgtttttctcaagcggcgcagcacttccagtccgctaagccccggaagcatgacatcaagaagcaccaaggaatacccgccttccgctgccgcatcaagaccttctgtgccattgtgtttgatcgtgacgctgtatccttcatattccaattcaagctgaagaaccctggcgattttttcttcatcttccacaattaatatgtgtcctttttccaaatttgaccatcctctcccgtccctatatgaaaaaaatgatttcgttgtttacaaaatgattcttatcatctattatgatgtcaaaataaaaaattgtatacggaaagcactaggggtgctgttttggctgagataaagcgcggaagaaacgcgctttgatcccttatgacccgatctggataataccagcgtggggaagtgcaggttgaccgaatggtgtatttttttgtgcgcttaatcgatctatgactgcatattcccttaggatatgcagttttttattttaccaaaaaaacaggaggtcggagaaatggagcatatttgcggtacaagcagaatcgccggttttcgtttctctttatatccgatgacggatgattttatcagtgtgatcaagtctgcgctgaaaaaaacagacacatccaaggtatggacgaaaaccgaccatatcagcacggttttacgcggatcgattgatcatgtattcgatgctgcaaaagccatttaccttcatgcagcaaacagcgaaaaacacatcgtcatgaacggcacgttttccattggatgcccgggtgacacacagggggatacatatctttccaaaggtgataagcgtgtcaatgaagatgctgtccgaggcttgaaggcggaagcgccgtgccaatttgccctttatccaatgaacgagccggattatatgggattgattatgaaggctgtcgacattgcaaaagcccaaggcactttcgtacagggtgtccattacgcgagcgagcttgacggggatgcgcatgacgtattcagcacattggaagccgttttccgtatggctgagcagcaaacaaaccacatcaccatgactgtgaatctttcggctaacagtccatcaagaaaaaacagaaagcagggataacatgaaaagctggaaagtaaaagaaattgtcatcatgtccgttatcagtatcgtatttgccgttgtttatttattatttacacatttcggaaacgtgcttgcaggtatgtttgggccgatcgcctatgaaccgatttacggcatttggtttatcgtttctgtgatcgccgcgtacatgattcgaaaaccgggtgcggcgctcgtttctgaaatcattgccgctctcgttgagtgcctgctgggaaatccgtctggcccgatggtcatcgtcattggcattgttcaagggctcggggctgaggctgtgtttcttgcaacacgctggaaagcatactctctccctgtccttatgctggccggtatggggtcttcagtagccagctttatctatgatctctttgtttctggctatgcagcctattcaccaggttatctgctcattatgcttgtgatccgtctcatttccggcgcgcttttggcggggcttctcggaaaagctgttagcgactctctcgcttatacaggtgtgttaaacggaatggcactcggaaaggaactgaaaaagaaacggaagcgggcgtcagaacatgcaagcctttgatgagcttcttaaggttgacgagctcagcttctcttatgaagaagacgagaaaccggtttttcaagacatttcgtttgagcttcaaaaaggagaatgtgttttattattaggaccgagcgggtgcggtaaaagctcgctcgccctttgtttaaacggtctatatccggaggcttgcgacggcattcagtccggacatgtatttctatttcaaaagccggtcacagatgctgagacctcccaaacgattgctcagcatgccggggtcgtttttcaggatcctgatcagcagttctgcatgctgacggtggaggacgaaattgcattcgggctggaaaatctgcaaattccaaaagaagaaatgacagagaaaatcaacaccgtattagaaaaattgcgcattacccatttaaaagaaaaaacgatatctaccctttcaggaggacaaaagcaaaaagtggctctcgcctgtattttggcgatggagcctgagcttattattttagatgagccgacctctcttttagaccctttctcagcgcgggagttcgttcatctgatgaaggatcttcagcgggaaaaaggtttcagcctcctcgtcattgagcaccagcttgatgaatgggcgccttggattgagagaacgatcgtactcgacaaatcaggcaaaaaggcgctggatggcttgacgaaaaatctatttcagcatgaagcggagacactaaagaaattgggcatcaccattccaaaggtctgtcatctgcaggaaaagctgagtatgccgtttactttatcaaaaaagatgctgttcaaagagcctattcctcccgggcatgccaaaaagaaggaagctccttctggggagagtgtgcttgaagtcagcagcctttcgttcgcgagaggacagcagacgattttcaaagacatcagcttttcgttgcgcggaggctctttaacggcgcttgttggtccgaatggcactggaaaatcgacgctcttatcagttctggcccgtctcatgaaaccgcaaagcggcaaaatccttctctatgaccagccgctgcagaaatataaagaaaaagaattgcgtaaacggatgggatttgtttttcaaaaccctgagcatcaattcgtcaccgatacggtgtatgacgagcttctgttcggccagaaagcaaatgctgaaactgagaaaaaagcgcaacacctgctgcagcgttttggtcttgcgcatttggctgatcatcatccgtttgcgatcagccaagggcaaaaacggcgactgagcgtagctactatgctcatgcatgacgtaaaggttttattattagacgaaccaacctttggccaggatgcccgcacggcggctgaatgcatggaaatgattcagcgtatcaaggcagagggaaccgctgtccttatgattacacacgatatggagctagtctcttcgtatgctgacagcgtgcttgtgcttcacgatacgggcctggcctttgacggatctccagcgcagttgttttctcaagaaacagggcttgttcaaaaagcaaagctcacccttccccttctatatgaatggatggcatttcaagaggaggtgcgtgatgaagcagccgttacatctcattaatccgactgtgaaagcggcggcggttttttgttgtgtcgtcatgctgtcgtttatttacaacccatacactccggcatgtttttatatcatcatcgttgcgggcgttctactggcggccggaatcccattgaaaaaatggttgttgtttacgattccgtttttgattttagcattcggatgcgtgtggacagccgcagtttttggaaaagtgccgacaacaccggataattttttgtttcaagcaggccctatctcaattaacagcgataatgtgtctgtcggcatctctctcgggtttcgtattttatgcttttccgccttatcgatgatgtttgtttttacaaccgatccgattttatttatgctgagccttgtccagcagtgcaggctctcaccaaagctcgcgtacggtgtcattgcaggctttcgctttcttccgctgttaaaggatgaggtccagctgattcagcaggctcataaaatcagaggaggagcggcggagagcggcatcatgaataaaatcagtgcgttaaaacgatataccataccgctattggcaagcgccatcagaaaagcggaacggacagcgcttgcgatggaatcgaaaggatttacaggaagcagaaaccggacatactacaggacattgagcgtgaaccggcgcgactgggtgttcttttgcctcgtcctcatattattcgcgggatcctttctcgtatctttatgtttcgcatcataaaaaatccgctatcacagatagcggatttttttattgatgatagtttaatgcttgggcaaggttggttttaatggtaatattcgaaaagtcaatccccagctgtacagcagtttgcgcaatttcaggcctgattcctgacagggttgaccggacaccgatcagattaagcgcctcaatcaatttaaagatctggtgcgccaccatcgtatccaccacaacaacacctgacagatcgattaacagatgctccacacgtcttttcgcacaagcttgaagcgtgttttccagaataaacttcgcccgttcggtatcaatgtcaccgacaaggggcagcaaagctgttgatttgctcagggtaatgacaggtgagcttaattccaatatcatttctctttgggcgtttaattgctgcttggcattcatttcagcgtgatcaacgaatgtataaatggtgaaatcaaatacttttacaatcaaatctgcccatttttgcttctctcccggttcaaacgctgattcattttcttctgcgaacttctcaaaatacttcgtatataatctcctgtttctcataaactcccgaatgacatactgaaccggtgtgtcgagatgtttttgatcgttggtcagctcaatgacccactcttgaaactcttcgagaaattgtttttccggtaaaacatacatgtaattcagatgccggtaaaattctctgtcctgctctttcaattcttccgttactgttgcattatgtagggcgtaaagcgaattcggatcactttcctccatcgtttcaatccattcctcggccatttgttccacatgctctgaaaaaaatgcatataatttttcattcagtttcatgacactgctcctttccccaacactattataacttgacttacagttgaatcccagtcatacacgccgaagccacccaatattttgaaaattactaattctttggtgtgtatcctattttttcaaaatgcttcaaatggctctgtccgagcgcttgtttttttcatataatatgagacaacacccttgaatccacttgcaagcataaaaaaggagggcttttttatgaatggtgaaatccgcttgatcccgtatgtgacgaatgagcagatcatggatgtaaacgagcttcctgagggcattaaagtgattaaggcgccagaaatgtgggcaaaaggggtaaaaggcaaaaatattaaagttgctgtattagacacgggctgcgacacaaggcaccctgatttaaaaaatcaaatcatcggcggaaagaacttcacggatgacgacggcggcaaggaagatgcgatttccgactacaacggacacggcacacacgtcgccggaacaattgcagctaatgattcaaacggaggcattgccggagtcgcgcctgaggcaagcctattgattgtgaaggttcttggcggcgagaatggcagcggacaatacgaatggataattaacggcatcaactacgcggtggaacagaaagtcgacatcatctcaatgtcccttggagggccaagcgatgtgccagagctggaagaagcagtgaaaaacgcagtgaaaaacggagtgcttgtcgtttgtgcagcgggaaatgagggtgacggcgacgaacgcacagaagagctttcctaccccgcagcttataacgaagtgattgcagttggatctgtttctgtagcgcgagaattatcagaattttctaacgcgaataaagagattgaccttgtggcaccaggagaaaacatcttatccacccttcccaacaagaagtacggtaagctgaccggcacttcaatggctgcccctcatgtcagcggtgcgcttgctttaatcaaaagctatgaagaagaatcatttcaaagaaagctttctgaatctgaggttttcgcacagctaatccgcaggacacttcctcttgatattgcaaaaacgctggcaggcaatggattcctgtatttaacagctcctgatgagctcgcagaaaaagcagagcaatcacatttgttgaccctataagattatttttcttatataatatacaccacatcatgtaaataaaaatttcaaattctatgttgacaatgaatttgaattactgttaagattaccaacaaatgattcaacttttcaaaaaattaataacattttctcttatcgagagttgggcgagggattggccttttgaccccaacagcaaccgaccgtaataccattgtgaaatggggcgcactgcttttcgcgccgagactgatgtctcataaggcacggtgctaattccatcagattgtgtctgagagatgagagaggcagtgttttacgtagaaaagcctctttctctcatgggaaagaggctttttgttgtgagaaaacctcttaggagcctgtatccgcgggttaacgagagtgttttacatataaaggaggagaaacaatgacaaccatcaaaacatcgaatttaggatttccgagaatcggactgaaccgggaatggaaaaaagcacttgaagcgtattggaaaggcagtactgataaagatacgtttttgaagcaaatcgacgaactatttttatccgcagtaaaaacacaaattgaccagcagattgatgttgtgcctgtttctgatttcacacagtatgaccatgtactcgacacagcagtcagcttcaactggatcccgaaacgtttcagacatttgactgacgctaccgatacatacttcgctatcgcccgcggaatcaaagacgccgtatctagtgaaatgacaaaatggtttaatacaaattaccattacatcgttccggaatatgacgagagcattgagttccgtctgacaagaaacaaacaactcgaagattatcgccggatcaaacaggaatacggtgtggaaacaaagcctgtgattgtcggcccttatacgttcgttacgcttgctaaaggctatgaaccgtctgaagcaaaagcgatccaaaaacgccttgtgccattatatgtacagcttttgaaagagcttgaagaagaaggcgtaaaatgggttcaaatcgatgagccggcgctcgttaccgcctctagtgaagatgtccgcggtgcaaaagaattatttgaaagcattacaagtgagctttcatccttgaatgtgcttttgcagacgtattttgattctgttgatgcttatgaagagctgatctcttacccggttcagggaattggccttgatttcgttcacgacaaaggcagaaacctggaacagcttaaaacacatggctttccgacagacaaagtgctggcagccggcgttatcgacggacgcaacatttggaaagcggaccttgaagagcgtctcgatgccgttcttgatattctcagcattgcaaaagttgatgaactgtggattcagccttccagcagcctgctgcatgttccagtagcgaaacaccctgatgagcatttggaaaaagacctattgaacggattatcctacgcaaaagaaaagctggccgagctgacagctttgaaagaaggcttagtatcaggaaaagcggcgatcagcgaagagattcagcaggctaaggctgatatccaggcgcttaagcagtttgcaacaggcgccaattctgaacaaaagaaagagcttgagcaattaactgataaagatttcaagcgcccgattccgtttgaagaacgtttagccctgcaaaatgaatctctcggccttccgcttttgccgacgacaacgatcggcagcttcccgcagtctgctgaagtgcggagcgcacgccaaaaatggcggaaagctgagtggtccgatgaacagtatcaaaactttatcaatgcggaaacaaaaagatggattgatattcaggaagaattggagcttgatgtccttgttcacggcgaatttgaacggacagacatggtcgaatacttcggtgaaaagctggccggtttcgccttcactaaatatgcctgggttcaatcatacggctcacgctgtgtccgcccgccagtcatttacggagatgttgaatttattgaaccgatgacagtgaaagacacagtctacgcacagtcattgacttccaagcatgtgaaaggaatgctgacgggcccggttacaatcttaaactggtctttccctcgaaacgacatctcgaggaaagaaatcgccttccaaatcgggcttgcccttcgcaaagaagttaaagcgcttgaagacgcaggcattcaaatcattcaagtcgatgaaccagcgctgcgtgaaggccttccattgaaaacccgcgattgggatgagtatttgacttgggcggcagaagctttcagattaaccacttcttccgtgaaaaacgagacacaaattcatacacatatgtgctacagcaacttcgaagatatcgttgatacaatcaatgatcttgatgccgatgtgattacaatcgaacatagcagaagccacggaggatttttagattacttaaaaaaccacccgtatttgaaagggcttggccttggtgtatatgacattcacagccctcgtgtgccgtcaactgaagaaatgtacaatattatcgttgatgcgcttgccgtctgtccgactgaccgcttctgggtaaatccggactgcggattgaaaacaagacagcaggaagaaacggttgcagcattgaaaaacatggttgaagccgcaaaacaggcaagagcaaagcagacacagctagtataatttttaaaaaaccatctgcatttggcagatggtttttttctataatacagccacaatcagtttcttattttagcaaatcccccaattactttgtttattttgcacttttttaagaatgttctttgcattcttttcggctatactaataacactctattgacaggagggattgggatgaatcatgaaacgttcttaaaacgggctgtcactctcgcatgtgaaggagtgaatgcaggaatcggcgggccttttggagccgttatcgtgaaagacggagccattattgcagagggacagaacaacgtcacaacaagcaatgatccgactgcccacgcggaagtcacagctattcggaaagcctgtaaggtgctaggagcataccagcttgatgactgcattttgtatacgagctgtgaaccatgcccaatgtgcttgggcgccatctactgggcccggcctaaagccgttttctatgcagctgagcacacagacgctgccgaagccgggtttgatgattcattcatttataaagaaattgataaacctgctgaagaaagaacgatccccttttatcaagtgacactaacagagcatttatccccgtttcaagcatggcggaacttcgccaataagaaagaatattaaaaggatcaggcatgcgcggcctggtccttgttatttctccaagtagccgctatgccctgtgcaaatacaaaacagcatatacgcgcaattcagcacggcagacaccgtgccagccacccgcttcatctgtaacttttggtttaaaggcatgcttcaaacgcttctctgacgttttatcataaatctgtgcccgccccgcatgctccgacaccaaaaaacatcctgagaacactcaggatgccggtcattattttaattctagttttacatcaacatttcctctggttgcctttgagtaaggacagaattcatgagcggcgttgacaagctcatgtgctttttcccgatctaaatctttcgtgttcacaactagtgtgacaccgattttaaacccgccgtcgctctcatccttcatgaggctgacctgcccttcaatctccgaatcaatttcgatattctgctctttggctacgtgttcgagcgcgccgccgaagcatgcagcataccctgccgcaaagagctgttccggatttgtgccggtttgtccttcttttttggcatttggcatgacaatatcaaaatcaagaacaccgtcatctgatgtaatatgtcctgcccgtccgcctcgcgcggttacttttgctgtaaatagtgccatatttcccaacctccttatttgtatctagttgttatatttccctttctaatctttttaaacatgctatgtttgccgagaataggaaaagtgaagtttttcagatacaatagaatcgaatgacaaaaagagttggtgaacaaaatggaaaataaatttgatcatatgaaattggagaatcagctttgttttttgctatatgcgagttcgcgggaaatgataaagcaatacaagcctctgcttgataagctgaatataacatacccccaatatttggctttgcttttgttatgggaacacgaaacgcttactgtcaaaaaaatgggcgaacagctgtatttagattcaggaacgctcactcctatgcttaaacgaatggaacaacagggtttgattacgagaaaaagatcagaagaggatgagcggtccgtgttgatcagcctgacagaggacggagcgttattaaaggataaagcggttgacattccagagacaattctggggctctcaaagcagtctggggaggatctcaaacagttaaaatccgctctatatacattgctggaaacacttcatcaaaaaaattgaggatgccttgtacaggcatcctctttttatttattcagcaacttcaagtgtcacatcaatatttccggaggttgcttttgaatacgggcagacgccgtgcgcttttttcacaagcgcctccaattctgatgcactgactccttctccttttacttgcagcgtcacaccaagcttgtagccctggtccgcttcatcctttaacagacttacattcgctgtaacctctgtctctacttttacccgttctgttcttgcgacaagctgcagggcgctgtcaaagcaagctgcataacctgctgcaaacagctgctctggatttgtcgctttttctaatttctttgctcttggtgtccccggcattgcgacatcaagctcaagaacgcggtctgatgaaatgacctttccttctcttcctcctaccgctgaaacagttgctgtaaataatggctgactcatttttcattcccccaatatattttatacaattaaattgtacacaattaaatttggtgtgtcaatttttcacgtataaaaaagcttatctcgtaatgagataagctttttcattgaacattgccccgctattcacggatttgcccagttcctttaatgatgtattttgtagaagtcagtgcaggaagccccatcggtcctcttgcatgaagcttttgcgtgctgatgccgatttcggctccgtagccgaattcaaagccgtcggtaaagcgggttgacgcgttatgatagacagcggcagcatcgacagccgtttgaaaatatgctgcgtttttgtcattttcagttaaaatcgcttcagaatgattggtgccgtattgttggatatgcttcacagcttcttggacgttttcaaccgtttttacgctgaggacaggcgctaagaattcggtttcccaatcttcttttgatgcttgtttgcttgaaggatgaagttcacataccaattcatcaccccgaatttcaactcccgcgttttccagctggtccagcaattctttcccgtgctgtcttgcccaagccttgtgaatcagcaatgattcaatcgcgttgcatacagaagggcgctgagttttggcatttacgacaaccttttctgccatttgaggtttggctgtttcgtcaatgaatatgtggcagtttcctgctcccgtttctaatacaggaactgttgattctctcacaacgagatcaatcagtttcttgcctccgcgcggaattaatacgtctaagccatcatttaacgtaaagagctcttttgctgtctctctgctcgtatcctcaatcagctgcacagcgtgaatcggaagcgctgattgctcaagtgctctgtgaatgacactgacgagcgctttgttgctgtggatggctgaggagcttccccgcagcacaaccgcgttccctgtcttcaggcaaagggtagccgcatcaactgtgacgtttggcctcgcctcataaatcattcctacgacaccaagcggcacacggattttttcaataaacaggccgttttctttttcaatcgtttcaagagagtcgccgattgggtccgctaagtcgattaagagctccaccgcgtccgcgatatcgcgtatccgtttctcatccaatgtgagacggtcaatgatgtccggtgttaaaccattctcttttccgttcacaatgtcttttgcattctccgccaagagaaaatccaattctttgcggagtccgtttgcaatgaggctgagcgcctcatccttctcggctgttgttttcatgatcatttcggctgctgcttctttcgccagcttcgcttttacagaaacttcactcatttttccgcctcctagtcttttacattgacccagtcattcctatgaataacctcaaacgttttctcaaaatcaagttcgtcactgcgtttgcctttagcctccataatctcctcggaggagtaatgagtttggcctttgccgatcacgccgcccggtcccctgacttccacaaccgcccctttcggaaagcttccgttcacacccacaacgccagcgggcaaaaggctgcttccattatggatcatcgcctcctcggcacccgcatcaatgataatttctcccgatatcggcgagtggaactgaatccactgccttgtgttgttaaccgaagatagttctttgtctccgatataagtgccgtctcccctgccgtccaaaatgtccgcaagtttttgctctccgctgcctgttccaatgaatactttcactcccagagacagcgcggtttgtgcggctaacagctttgatttcattccgccggtgccgacctttgatccagctgaacctgcatatccaagcaattcaggcgtgatctccggcaaataatcaaatcgtttcgcctcaggattttcatttggattggcatcatacagtccgttaatgtcggtgagaatcatgagctggtccgcgtgaatcaatccgctgactaacgcagaaagcatatcattatctccgaatgtcaattcttcaacagatgtagaatcgttctcgttgataatcggaatgacgccgcgttccaataattccattatcgtagcatacgcgtttcggtaccgttctcttttcgaaaaatcatttctcgttaaaaggatttgtcccggagttaatgagtattgtttaaattgattcatatattgctgcattaacagtgtttgtccgaccgcggccgccgcctgttttcctttgatggtaacgggacgggacggataaccgaggctggaaaaccccgccgctacggcacccgaggtaatcagaatcatttcatgccccgctttttttaacacggaaatcgcctgaacatgctctctgatttttgcctcatcaatgcttcctttgctattcgtgagcgaactgcttcctattttcactactattctttgttttttcatttattctcctccgcggctcttctacaataaaaaaacccatttcatcctgattcataaggacgaaatgggtttccgtggtaccaccttgattgaacgcgcttgtgcacgctccgctctcctgtaacgccaggttatgcgcctaggttttccccctaggactccaaggcaggttcggcaggtttcatgcggcaaaatgtttcagcgattcattttgctctctgtcacagaaaggtctgcttactaatcctcttcaacgctcaatgatttttttatattatgcaaagaaaaaagacacttgtcaaggttttttgttaccaaaaatagcccgcattgcgcgggcctcttgcagtctagttaaagacgattgttttattttcatgaacgatgacacggtcttccaaatgccatttcacagcacgggcaagcacgctgcgctcaattgttcttccgatgtttttcagcgcttccgcattatcgcggtggtccacacgctcaatatcctgttcaatgatcggcccttcatcaagatcgtttgtcacataatgagatgtcgcaccgatcagtttcacgccgcgctcgtaggcccgtttgtacggattcgcaccgataaaagctggcaggaatgaatggtggatattgatgatgcgattcggatgagccgaaacaaaatcaggagttagaatctgcatatagcgtgcgagaacgatgacatcaacatcgtactgctccagcagttcaagctgcttcttttcgacttccgctctgatgtctttgttcgctttcatatagtggaatggaatgttcaggcgctcaaccagctctctcgcttcctcatggttactgatgacaacagcgatctccgccatcaggttgccggtttgccattcccaaatcagctcatgcaggcagtggagctcctttgaaacgaaaatggcgacacgcttcagttcgctcgccaaagttaagctccatgtcatgtcgaatttttccgcaacagaggcaaacgctgcctgaagtgatgattttttttcacgaatgcctgcgcagtcgaattcgattctcaggaagaaccggccgccttcagggtctgtcgtatattgatttgattctataatattggcaccgtgttcaaataaaaacgcggaaactgcagagacgatacccggctgatcggggcagctgaccaagagccgccctttatcctcatttccgtcacggtattcgtccaaccgctgagtcatatatgatttcatgaataatccctcttatctttgtaagtctaaactatttatccattatactgaagatttgataaaaatcaatttatgacagaatttttaaaccaactgctgagcataaaatcaacgcgataaagaagatccgtttggcgtctttctgctccttgtaaaagaggatgccgataagcgccccgccggcggtgccaattcctgtccagaccgcgtaagccgttcccatcggaatggtttccattgcgtacgacagcaaggaaaatgaagcggcaaaaccaacaatgatcaacagcacccatttcacgcttttttctttcgcatattgattcataagggccacgccggccatttctaaacagcccgcgcacaataaactgatccagtgcagcattatgcctcgcctcctttttcctctgtctcatcctgtgtcacaagcttcaacccgattacaccgattaagagcacgccaattaacaatagcttcggccatccaaccggttcatgaaaaagaacgatttcactaagtactgttcccgctgtgccgagcccggtaaagacggcatacacggtaccaacaggcagactgtgagtcgccttcattagaaggtaaaagctgaatatgatgccgatggcagtgccgctccatgttaaggctgagtcagcgtgctttaagcctatcacccaaacaacctcgaaaacagcggcaagcacgaccaatccccatttcattttgagtcattcctttctatctattaagattctccgaaaacaaaaaaaccccggacagtcgtctcacatgagattgactctcccgggcttttttccctccgtgtgcatacgcgcttctatttacgcgtatgtgttttctctcggaccagtccatgtcaattgacatgcggaaccctagaaaactttacatgatatcatgatactaaactgagctctatctttcaattgtaagatttcctttcatataccgcgatcggtttattccattttctgatcgttttgctgtaatgcatgccgattttctccgctacccgtatggacgctttgttacccggatcaatcaaagctgccattttgccgaactgccgctcgttaaagccatagtccagacaggcccgagccgcttcttgcgcatagccgttcccccagtggcggcgggcaaacatatagccaatttccattacggtttgattttcgatctgctggggaacgatgccgcattgccccaaaaactcccctgtccgcttatcttcggcgatccacagactaacgccgtaccctttttcatttcgttggttccaattgacccactcgcgggtttgcctcttatcttttaaaccggaataatatgtcatgacgtcaggatcattaaaaagcagcccaaacaaagtggcttgatcccgatcttccatacagcgcaaacgaattcgatcagtcacaagcttcgttttagcgttcatacttcgccacatcctgcttccattcttttttgagagcttcaatatgtgcctgatgatagcggttatgatctgccatatgccaaattccccatcgtatcgtcgcggtgtcaccttcgaaggaaagcggctggttcaaagcattttcagttaaagtgaagcataccgatttcaactcctctactacatgctgatgtcttttcaggagttcatctaagcctggctgattcaccggttcaggcagccgtccgctttcatctgtcatcgggccgtatgtctgttcaatatggttcggtatccgattttccttgatacgccagacccatttgatatcaacatttgtgatatggtgcaaaagctgagccgtgctgttttttgtttggcagcgccccttatagtaaagttcactgtgtgtcatatggcttacgatagaagccagacggagactgttttcttccactgcggaatacagcagactgaccgttggcgccatgtcgtttcttatggataagtccttcatgttcagttcccctcctaactaggtacatttgacaccaaacaaaaattccctttaaaaaagaaaaaagctctcattacaagagagagccatcttagttgttatttcccggtttatataagtaaggatcatgctgcgggtcattagaggtatttaaatcaagggatatatcacctcgcgcattcatcgtgcctaaggtgatcgaagacagcagtttggggctgtaccctttttcctcaagcttctcaaacagccaggatcggtttttttggagatatttcaaattatgatcaaggatttcgccatccagtatgagcggaatcgggataaaattccgttcagcttccatattcaaatcccgcacctgcaccgctctcgcttcctctttcgggatgacgcttacttctcccgtttcttcaatgatagcaagatcaatgtcagccgggtcggcatagcccttttccctcagctttccgagcagttcattaacagtcagcctttctttacgaaggccgcgttcatcaatatccccgtttcggattaggacagtcgggctcacgaccaggagccatcgccatttattagataaagagagcttgctcatgataagataaagcaccaaaaaagcacccgcataataaattgacatcggcagcttggatgtaaggatcggctcactgataatggttccgattgcaaaggtcaaaagcaggtcaaaattgttcatttgtgacacagcttttttaccggcaagccgaaacaaaatatatgcaatcgaaaatacgataactggcttcagtaaaaatacccataccatccataacaccaatctttacctccatccgctggtcatattgagcctattgtgccccgtggcaggccctctatgcatcagtgtctaggcgaacgtgcatatcgactgaacataacacaatagaaagtgacaccgattggaggcgcaatacgcaatatgaaaaatcagaagtcgaatgccctttggccctttgatctgcctttggcttcccaacccgagagctaccagcagcaaacaatcgacaggctggctggtttggagctaaggatggagcaactaattagagcgattgaggtaaacaatgaattgctgagaacaatgcaagaacagcaaaaccgtgtatgcacaaatggcggcgggtctgtgattgtccggatgtagaaaccggcgcttgtctgccttcttatatctcaataaaaaactcttctctgaaaggagaagagtttcatgtatgtgttcaaacggactgcgccaaacttaattgcgggccgaatagctcgtaatggatagactccggcgctgatccgagctctgatacaagcttatgcattgccgtaataaacgacggtgaaccgcaaatatagtaatccgcatcggtgttggcaatcagttctttgaggaattgctgatcaatctgtccttcatgaaaatgcagatcacctgcacggtcttcctctgtcggctcgcgatacacaaatgctgttttaacagcagaatgttttgctgcttcttctacttcatggcgcaatgcatgatattcactgtttttcgccgcatgaatgaacagaatttgtcgttcaggctgtttggaaacagatgttttcagcatgctgatcattggtgtaatgccaactccggcactgatcaaaacgagatctttttgtgatgcatgatctaaaacaaagtcccctgccggtgcgctgatctctattgaatctccctcctgcagcccatcgtgtaagtaggaagacacgacaccatccttcttcacggaaattcgataatagtcttttcccggcatatcagacaggctgtactggcggatatgcgtatattcagaatcaggaatccgcactttgatgctgatatattgccctgcttggaattcaggtaacggcttgccgtcttccggtttcaaatagaaggatgtaatttctttgctttcccgctctttttttgcgataacgaatggcttatactccttccagccgccggcttgctcttcagcctgttcatacatgtctttttcaattccgatgaacgcgtcagcaatgactccgtacgctttttcccatgcctgcataatgtcaggagttgcagcgtctcccaatacatctttaatcgcaatcagcaaatatttaccgacgattgggtagtgctcaggcttaattccgatactgcggtgcttgtggccgatttgtttgacaaccggaatgatgtttcctaattggtcaatgtttgccgcagctgcaataacagcatttgccagtgcagttcgctgtgtttttttcttttggtttgtttgattaaaaatgttcaaaagctctggatggtcttgaaacatccgatcgtaaaaacggccagtgattgtttctccatgctgttgcaatacgggtacagtgcttttaataatttcgattgttttgttatctaacattttataaacaatcctttcgaaaagatgtatttaaaatatatctttaaaatacacgatcttacgaataaaagatatatctaaaatgaatctttaataaagttgtcacaaaattatcaatttaacatgacatttgttgcttttttatagaatcccctagcaaaaacggactaaccattgtaataatcaccattgaaaagtacaaaaaaacccaaaacaacttatgttttgggtttaacgttcaccaaggcttatcagttccgagcgcatttgcaagcgcctggctgtgtttcttgcggttcttacgttcattagcgcgctgtacagctgtattatgcagcatgatttcttcttctgtttccggtacaaccctcggtacaggcaccggcttgccatttgaatctaatgcgacaaatgtcaaaaaggatgtggcagcgagttcccgttcgccagtcatcaaatgctccttaataactttcacaaatacttccatggaagatgtgccgacccatgtcacatatgactctaggcagacagaatccttttgcccgatcggctttaaaaaatctacagaatccattgaagctgttaccgtttcacgtctgcaatggcgcgccgctgaaatagaggcaatgtcgtctatgtagctcattaattttccgccaaacagcgtattatggttgttcgtgtcaagcgggaacaccctgctggttttcacaacctttgactctttacaaaatcttgtttccggtgtttccatacctttctcccctttgatgtctgatcttttagctaaatgcacttatattctcctattaaacaatattctcttccatttgtctaaaatttaaaatggtttaatgattttcatgatgagggaataataaatgtattcttcacactttaggaggaaaaacaaatggacgtatccatcccgaaatctcagcacaaaacagtatgccgaacggaatacggcacacttcagaaagtgatcttatgcaaacctgagcacatgaccataaaagatgttataaacgaaacacaaaaacattttgaagatgacaatattcatgtaaaaaccgccaacgaccagcacagccgtttagtggaggcacttaggtcacacaacgttgaggtcgtccttttgcccgttcgcgacggactcccagaacaggtttttactagggacataggatttgtcatcggagaaaaagcctttctgtcaagcatgactgaaccgattcgccaaggagaagaagccgttataaaagatttttttcacagccaaggtatctcttacacccgcatgcttgatacgagtattgaaggcggagacgtcattatcgatgatgacattgtctatgtcggaatcagccagcgcaccgacatttcagctatcggccagctggaagaggcacttcctgaatatacgatcgttccagtgaagcttcatgaaaaatttttgcatttggactgcgtatttaacattatatctgaaagcgaagcgttaatttatccacaggccattgagccagatgcagccgatatgctggcaaaacgttatgatcttattgaggtgcccgaggacgaacaatttacgcttggcaccaacgtcctttcaatcggaaaaaaaacgatcatcagtctccctggcaaccgccatgtcaatcaacagctatcgaaaagaggctatcacattatcgaaattgatctgtcagaaattattaaatcaggcggctccttcaggtgctgcacaatgccgctgattcgaggcgaatgaagaatcttcccctttttcatgttttgaacagcttattttatcaagatacgttaatatagaggtgacatcatttttaagggggaaatcgcatgacaaaatacataggatatgtcgggacgtatacaaaaggcggaagcgaaggaatttattcatttgaacttgatactgagaaaaaagcactcagcgagccaaagctggccgctaagctgggcaacccgacatatgtggcgccgaataaaaacaacgccatcctttattccatcgaaaaagcagacggccaaggcggagttgctgcctatcaaatcgataaaaacagcggcgaattgacatttctgaatcatcagttaattgatggcccttcgccatgccacgtaagcgttgatgatcaaaatcaattcgtactgactgccaattatcacagcgggaaggtacacgtttttccggttcaggaagacggcagcttgcaatcacctgtttcagaggccgctcacacaggaaaagggccgcacgaaagacaagaaaaaccgcatacacactacgcggggttcacacctgaacacaattatgtggtagcggttgatttaggtatagataagctctacacctataagcttaaagacggtgtgttgactgaatccggaagccattccttcgctcccggtgcaggacctcgccatatcgcttttcatccgaaagaaaaatacgcttatgtcatgacagaattaagcaatgaagtgattgcgcttgaatacaacccgacagccggcgaatttagagatatccaagtcgtttctgccatccctgatgattttacagataacagccagggaagcgcaatacatgtcacgcaggacggacgttttgtttatgtcgcaaaccgcggccatgacagtatcgccgtatttgaagtgaatcaatattcaggagagctggctttcgtagaaagagtgtcgacagaaggaaactggcctcgtgactttgtatttgacccaacggaagggttcctcgttgcttcaaatgaagaaacaggcaaccttgtcttgtttgaaagagacaaagaaaccggccgattgacactcctcccatcaacggtttctgtcccttacccggtttgtgtaaagtttttacatcaagtataaacaaatggagtggctctagtaaaaaggagccactctttttatttatcttactttttccttcgtttcagcatttcgatacaaatggcaagcgacaaaacggccgggttcgatttcttgaagctggggacgagattctccacattcaggcatcgcctccggacagcgggtacgaaacacgcagccgcttggcggattgaccgggctcggcagctctccttttaagagaatacgctcacgcttgtcctccaattcaggatctggaatcggaatcgaggacaaaagcgcctttgtatagggatggagcggttcacgatacaaggtgccgctctctgtaatttccatcatgtgccctaagtacataacaccgatcctgtcactgatatgcttcaccatcgaaagatcatgggcaatgaataaaaacgtaagccctttctctttttgaagccgcttcagcaggttgaccacctgcgcttgaacagagacatcaagtgcagaaatcggttcgtccgccacgataaattcaggattcagcgacagtgctctcgcaatcccgatcctctgcctttgcccgccgctgaattcatgcggataacggctgccaaaatcgggatgaagcccaactgcctcaagcagctcgttcacgacgagaagccgtgctttatgggtattgtagaggttatgaatctccattggctccaaaataatttctcgaacggtcatgcgcgggttaagtgaagcataagggtcctgaaaaatcatctgcagtttgcggttgaaggcaaactgctctttttcactcagtgcatgaagatttgtgccgcggtatgtcacgcttccttctgtcggctgataaaggcgcatcagcactctccccaaggttgatttcccgcaccctgattccccgactagcccgaacgtttctccttcacgaatctgaaaggtgaccccgtcgacagctttgactgtccgctttttccctgcgtcaaaatgcatttttagctggctgacctctaacaaaggcagtggcgtcatttgtctccctccttattctgaaaaacagcggcgcaccgcacaaagttctttttcatagcttgtgtcttttaatgtaaggatttcgattgattttcctgtctttggagaatgaagcattttcccgccgcctacatacagaccgacgtgatgaatcgctccttttccttcctcataagcaaaaaacagcaggtcaccagccttcatatcatcaagcaggacatactcccccgccttagcctgatctcccgcatcgcgggggatgctgtatccattcgccttaaatatactgtacataaatccggagcaatcaaacccaaacccgctgatccctccccacaggtagggaaggccaaggaaaaacgcacccgtttgaatgatgtcttcagcagtccctttctgttggctgacaggcactgcatcactttgcttcacaaacctttctcccaaaacggtcgaaaccttaaaatatcctttttcttctgcaataagggggagaactgtcaaaaagctcaattcgatctccttttctccattgcttctgtacaaaaaggcagcaggtttgctgatcatcacatcgtgttgtgtatggatgggctttgttttttccagctggttctttttcatccagcctgggtatccgcgcggatcctttcgggatggctggctaggcacgatcacagaaacccattccccctgttccgccgtcacaagtaccttttcgccaaagagaacctgagtttggattacattgtctgtacataatccaagccgttcatcatacgtcatgcgctccagccagtctctgatcattacagtcggttgaagcatgaattgatcagacggacgcggtgaatcaggcgctgtccagatgttggccactgctgatatgacagtgtgcatcattgctctttttcccctttcaaaagcgcagccccggtgattccgaggcccggtttgccaggcatcgaaatcgtgctgccgcgatatgttatgccgcctttgaatacatctgttttcagcatcagcggcgcgtcaaaatcaaagcgtgtgatgtttctcttgcttgccgcaaaatgcgccgcggccgtaatgcccaacttcgtttcgatcatgctgccgaccatacactccaccccgcaggcctccgccatggcattaattttctctgctccgctgatgccgcccgctttcatcaatttaatattgatcaagtctgcgctccgggtttgcagaacttcgaacgcctggcgcggtgtaaaaacactttcatcagccataatcggcgtatctgttgcatctgtcacctttttaagcccagcgagatcatctttatggacaggctgctcgacaagctcaatgcctaggcccgcatcctccattttccgaatggcagttaccgcttccttcggcctccatccctgattagcgtctaaacgcagtttcacagctgatccgacacgttttctgatttcctggatacgggcgatatctgttgcaatatcatcttttccgacctttattttcagcgtttggaagccttgtttgagataattctcggcatcagctgccatctcttcaggtgagttgacactgacggtatagtctgtttccagcgtatctcggtatccgccaagcatttgataaagcggcagcccgcacatctgcgcccagccgtcgtatagcgccatctctacagcagccttcgcgctcatatttcctgtaagaagatgctggatgtcgtgcagtatggcctcacagccggacaggctttttccaagcaatgccggtttcaacacatggtgaatggcactttcaatgctatccatgctgtctcctgtaatcactaacgtcgggggtgcttctccccatccgactgcaccgctgtcataagtaatccttactatgactgattcagccgtatacacagtgcgaagcgcggttttaaacggctttgtcagcgggacagcgattcggcttgtttcgattcgaatgattttcatgtcttcagcgccccttctgaaacgcctgcctctattacgactgttttttctgctgtattcatagcagctttcgcaccgatcggaaccgcaatacttggcgagcagtggccgattttaaatcctctcagagcgggcctgcccgcagatataatatagtcttccagcacctgctcaagcgagagagacttctctcgcttcaccgggacacaattgtgaaaatcacaaactagaattcccgccgcgtccgtcagcttccccgccattttcagctgattcagcatccggtcgatttgataaggctcctcgtcaatatcttcaataaacagaagctttcctctcgtatcaatttcaaatggcgtgcccagtgtagacgtcagcaaagacagatttcccccgacaagctcgccttccgcttttccaggaacaagcgcggtcagcggagaaagctcttctgtataggtgaattccgtctcctggaagagctgcttatatgacgcttttgtcaacgggtgaacgtcgtcaaggccaatatccgtgctgagcatcgggccatggaaagtgacaagacctgtgttttgatgaatggcagtatgtaaaaacgtaatatcgctgtatccccaaaagattttagggtgtttgcggatcaagctgaaatcaatgcccgcggcgatacgtcctgtcccaaaacccccgcatgcgcacaacactgcttttacctcatcgtctctgaacatctcatggagatccgccagccgctcatcatcctgtcccgctaaatagccgtgctggtttttcagcgccttgcccaacttcacctgaagaccgagctcttctaaaaataaaagcgcggtgtcaagcttttttggatccggcggacttgcgggcgcgatcactccgactgtatcacccttgttcaacgctttcggcttgtaattcaacgaaaacactcctttcatttgctctgcaccctacgtatacgtgcaagaaagagaaaaaataccgctccttcgcataaagaagcagtatttcctcaatcaccgccatcagtttttatctgcccattttaagtcgatatagccgacagggtgacggacaattccctttacttgttcattttgcaggtgaacctgattataaaaataaaccggaatgaccggcgcttcattgatgagcagctcttcagcttgatgcataagagagaaccgtgttttttcatcggcttcatttttcgcctgtttgatcagctgatcgtattctttattggcccagcctgtgcggttcatcgaatttcccgtttgaaaggcttccagaaaactgatagggtccgcgtaatcaggcaaaaatgagctttgagagaattggaatttcagcgctttttgatcctctaaaaatacgttccattccatattggccagcttcacatcgactccaaggctatttttcaatttttgctgaatagcttcggcaatctttttatgctccggctttgtgctgtaagtaagcgtgatcgcaggaagcttattatagttttcttccttcatgcccttttcgagcagctgcttcgctttgctttcgttaggcttgatcaggtctccgcctgcttcacggaaatctttgccgtcaggctgcgtaaatccaggcgatacaaaggcgcgcgccggtttttcattatttttcgtgacgtactttacaatttcctcttgatccacagccatcgcaaatgcttttctgatgttttcattttgaaacggctccatgttgacattaaatcgatagaaatagagacccgcctggtcaacaatcttgacgttatcctgatccatcagctggtcgcttaactctgcagggacataagcggtatcaagttcccctgattgaaacatctgataatctgtatttctgtcactgaccatcgcccatttcaccttatcaagcttcacggtatccttatcccaatacgtgtcgcttttctccatagtgatgctgtcatcatgcttccattccgtcagcttaaacgggccgtttccgacaaatgtatccgcctcagcaaaccactttggattgtctttatcgaccttttcatttaccggaaaatacgcaggattggacacaacgctcagaaaatatttttgcggtgcttccagtgtaacttcaagggttcgatcatcctttgccgtcaccttcacatcgtcttttttccctttcccgctgttatatgcttcgccgccttcaataaaataacctaggaatgctgatgaagcgccttttttcggatcaagcatccgcttccacgcgtattcgaagtctccggctgttacaggatctccgtttgtccatttcgcattttcccgaatcgtaaatgtgtaagttttattatctttcgaaacagaccacttctccgccattgccggctcaggctcatgatctttgccaagacgcgtcagcccctccatgatgttatttaacggctgccatgacacattattaaagccgatcggcggatcgaatgaagtcggttcattttcattatttacatacagcaccttttctccgctggtttttgccttatcatgactgccttcttttccggcctgttcatttgctgtgcaccccatcagcgcaaacgaaagtcctaatgcaagacccatgcccaatagctttttcactcgtttcatcctcttcccccttttcatgttcaatccttcgcatctcctgacagcaccgcatgctctgctcgttgatcctgcagccagcagttgacggtgtgcgagtcagatctgatcgtctggcccgggtacaccctgtcacacacaaccatcctgttcggacagcgggcggcaaacgggcagcccggcggaggcgaaaataaatccggcggcgttccgtcgattgggatcagctcagcgccatctaaatccagccgcgggacagaacccagcaggccttttgtataagggtgctgcggctgataaaaaatatcttttctcgtgccgatttccgccattttcccggcatacatgactgcgactctgtcagctacctgggcaacgacccctaaatcatgtgtaatcagaatgacagacacattcgtttttctctgaatctctttaaacagctctaaaatctgtgcctgaatggttacatccagggcggtggtcggttcatccgcaattaagatgtcaggctcgcaaatcagcgccatcgcaatgacaatccgctgtctcatgccgccgctgaattggtggggatattgctttaggcgctcttcgggatctggaataccaaccaatgacagcatggaaagcacctctttccgtgccgcttttttgctcatttttttgtggcgcaatagcgcttcccccagctggtcgccgacagtcagcgtagggtttaacgccgtcatcgggtcttgaaaaatcatagaaatgtcggctccccttatacctctcatttctttgtcagagagacggcaaaggtctttgtttttaaatagaatgctgccgtctgtcaccttcgccgaataaggcggaagcaggcccatgatgctttgggaggtaacgcttttgccgcagccggattcgccgacgatcgcaaaggtttctcctttatacaaatcaaagctcacccctctgaccgcctgaaccgtcccgccgtaagtcgtaaaagacacgtgcagattttggactgacagaactttttccatacagctacctcctcagcttagggtcaagcgcatcctgcaatccgtcccccagcacattaaacgcgtacatcgtcagagatatgaaaaaggccggaaaaaacaggcgccaccaatgcccagataaaatcgtaggcaggccgtcattcgccatcacgccccaacttgcaaacggagcctgtatgccgaggccgagaaagcttaaaaatgattctgcgaatatggcggcaggtacggttaatgtcatttgtacgatgatcgctcccatagtattcggcagcaaattcttccggatgatgcgaaaggttttcgcgccaaaggttttcgaggcgagtacatattcataatttttaatctgaagcacctggcctcttacaattctcgccatgccgacccacccggtcacagtaagcgccacaataatcgtgcccagtcccggtcccatgagcaccatcagcaaaatgacaacaagcagatacggcagtccgtacagcacttcgataatccgcatcataatgctgtcaatcctgccgcctttatagccggcaacgcctccgtaaatgacaccgatcaaaaaatcaatcagtgctgccatcacgccgacaaacaacgagattctcgcgccataccatgttcgggtaaacacatcccggccgagttcatcggtgccgaaccaatgatcggctgagggcggaagattttgttctgtcagcgattgacgtacgacactatggggcgataaaaagggcccgataactgccatgacaaaaagaaataaaagaataaagagtccggccatcgctaatttattttttttcagcctcctccaggcatcctgcgtgtatgataaactcggccgcttgaccgaatcggcttcccgatttttttcctgattcgagacaaaccactcatcaggcacctgattgtgctgttctggctggcgttcatccgtttgtacagggagattcacacgcttcaccctttcttatgcagtttaatgcgcggatctaagagaccgtaggccaaatcgaccaaaaacagcatgataatcagaatgacgctgtaaaaaacggtcgttcccataatcacgggatagtcccgctgattaatgctttcaacaaaatattttcccattcccggaatggcaaagattttttcaatgacaaagcttcctgttaagatgctggcgacgagtgtgcccaggacggtaatgacgggcatgagtgcatttctgagtgcgtgttttacgataattttgaacggagaaagcccttttgcttttgctgtgcggatataatcctgtgtcagaacttcaaccatgctcgagcgtgtcagcctggcaatgatcgccattggccctacagcaagcgctgcggtcggaagcaccatatgaatcgggctcgtccatgtcgcagcgggaaatagtttgagattgacagcaaattgctgaatgagcaatgttgccagaataaaattcgggatggagatgccgagtactgcaagactcatcgcggcgtagtccaaaaagccattgcggcggagtgcagcgattacgcccagcaccagcccagaaatcacagcaatgacaatcgctgtcatcccaagctcaaaggaaacgggaaatccgcgttccagcatatcatttacgctgtccgacggttttttaattgaaggtccgaaatcgaatgtaatgatggattttaagtagaaaatgtattggaaaatgagaggatcgtctaagtgatagtaggcttcgagatttttttgaacggcttcatttgtgcctctctcctcgttaaaaggagatccgggaatgaccttcatgagaacaaaagtcagggtggtaatcaccaaaatcgtagctgccattgcccaaaaacgctttatcatgtatcgcgccaaagcctaaaacacccctttagcagaatgatgtccgcatcgcaagctcagtcatgacaagcatcgcctgataggcttcaagcatgtccttcgcctgaaattgaacggttgtagttcccgtcttgatttccgttcctggcatcagattcgcccattctgcttggccataattggcgaattcaatgctcagaaccggcctgtcaggcggtgtgagcggcttgactttgtccttgttttgcagggcaaacgcggttttttctgtcaacagccgtccggctttcgcaggggacaagcacttcactgcggatcttgaaatggtttgtttgactgcggctgtcgccacgttcgggataagctcttccgcttccttcgccgcccggtcatccccggctaccattaataccgggacatcataataaccggcaacgtatgcatttaatccaagctcaccgacaggccgatcgtttatgtaaaaatgacggacgccgaaaatcatgctgtgtgacatgacaccgggagtcgaggctctcgcatgataaccgagaaacaaagcgcctgtaaacgtatcatccagtccctccaccattgaaaatggtttgacgtcaccagaaatcaagtctgcttcagggtgaagcttttcaaccatcagattattcatcttcgaatgactgtcattgaccagcacctcggtacacccgctgttaaacgcttcagcaatacagtagtttgcttcttcagtcatgataagccgtccgcgttcataattccgcttgccggaatccacaaaggtatcgtccggaagacccgaaataccttccatatctactgacatgtacaatttcataacgctcctccttttttactaaattatgaatattctaacagattatattaaaaaaagaggaaaaatgcaatataactggggaaaatctcaaccactcagtgataaaaaaagaatcctctttcaaggattcatgtctgtttaccaacctgttctgtaagcagttcatattttttcagggttctttcaaacacctcatcaaaaacgtctggcacagaggcgcgtatcacctcagctccctctcccgttattccgcctttggttgcgacacgttccagcgtctcctcgaaagacatatttttttcgatcagcatcttgccagttccgtatagcgaatgaatcagaaaatcaaaggcttcttctttggacaggctgctgtttctgacggcagacagtgccagttcttcaaagattgcggctatgaatcccggtgccgagctcgttaaattgctggccgcatctaaattcgattctttgatttctcgtacacggctgaaaaccgataacaattcattcagatattcttttttctctgcagccagtgcttcactgtgaacgacaagtgagatgccagcttctgcttcggacgtaatggcaggaataacacgtgagataccagcttctgtttctgcctccaaaagacgcagcggcacaccggcagctatggatacgatgtgagtatttctgttcacatacgggtgcagacggcgcattgtttcgatgacatggagcggcgggacgcatatcaaaatcaattggcacgtatttgcccaattctccaacggatcagccgatacgtttggataatctgacatgagtgcccgcagccgctcccccttcgttctcgtctcaataaatagctcattctcttttatttgtccatgtttcaacagctgtctggcgatcatatccgccatgctgccatatccaatcaatccaatctgttccatcgactcagtcctttcatatacaatatgaagtgtaccgttttccgcactttttcacaatttcccataatcttttcatttttatcccacagtttttgtttatgataaactcaagtcataaacctatcaatataaatagacatgtgaaaatagagaaacggagtgaacatgatggataactatcgtgatgaaaacagaacgaaaggtaatgagaatgaggtctttttaacgaaagagaacgatcagagcacctcctactcggcccgcaatgtcattcatgatcaggagaagaaaaaacgaggcttcggatggttcagaccgttgcttggcggagtgatcggcggcagtcttgcccttggcatttacacgtttacaccgcttggcgaccatgattctcaggacactgcaaaacaatcatccagccagcagcaaacgcaatctgttacagcaacaagcacctcctctgaatctaaaaaaagctcatcaagctcaagcagctcatctgcattcaagagcgaggactcttctaaaatctcagatatggtagaagacctttcaccagcgattgtcggtattacaaatcttcaggcacaatcaaacagctctttgttcggctctagttcttctgattccagcgaagatacagaaagcggttcagggtcaggtgtcattttcaaaaaagagaatggcaaggcttatatcattacaaataaccacgtcgtagaaggggcatcatcactgaaggtatctttatatgacggcactgaggttactgcaaagctggtaggcagtgactcgttaactgatttagccgtcctccaaatcagtgatgaccacgtcacaaaagtggcacacttcggtgattcatctgatcttagaacaggcgagaccgttattgcgattggggatccgcttggaaaagacctgtcccgcacagtaacacaaggaattgtaagcggcgtggacagaacgatttcaatgtctacatcagccggcgaaacgagcattaacgtcattcagacagacgcagcaattaatccaggtaacagcggcggtcctttgttaaatacagacggcaaaattgtcggcattaacagtatgaaaatcagtgaggatgatgttgagggtatcggatttgccattccaagcaatgacgtaaaaccgattgctgaagaactgctgtctaaaggacaaattgaacgtccatatatcggtgtcagcatgcttgatctggaacaagtgccgcaaaattaccaagaaggcacactcggcctgttcggcagccagctgaataaaggtgtttacatccgtgaggtcgcttcaggctctcctgctgaaaaggccggattaaaagcggaggatattatcatcggcctaaaaggtaaagaaattgatacaggcagtgaattgcgcaatatcttatataaagacgcaaagatcggtgataccgttgaagtgaaaattctccgaaacggcaaagaaatgacgaaaaaaattaaacttgatcaaaaagaagagaaaacttcgtaagacataatgcctcaggccgcaaaagcggtctgaggctttttattagataaaagacctaattgttctatgaaactttctgaagagatatccgtatatcatacagattgacatcattctcatcagatgttagaaacatcgtttgctaggaggcatgaacatgaaaaccgtgggactgggtatgatctgcgcaggattggcttttcttttgctgagctttcttctctctgaatcgacgttgacgtggggaattgtattgggtaccagtattctattaaacataactggtacggctctaatcatgcgtttcttaaaagccccccaatataacagctgacatgcagcaaagccgatgacgaaatctttaagttttgctgtttttatttcggcatgactgaaccgcagtacaagctcacaatctcttctttacccaatttccatatatctatcagcatcttttgctttagatcgggctcagagcataaaaaccccctgtccattacggacagggggtttgaggttatgacatatgctggtctctatagagccttttattttcaattccatacgatttttggacgatgtaaagcggcctgtctttggcttcatcgtagattctgccgatatattcgccgatcacgcccaaaatcagaaggacaatgccgctgaacaggagctggatcacaataagtgatgaccagccggtaatcgtgctgtctgtgaatagtttcagatacagcacgataaacatatacagaaatccagcacctgacattaaaatccccgcatagcttgccagcttcaacggtttatgtgaaaatgtcgtgatgccgtccattgacagcttcagcattttcttgagcgggtactttgtttctccggcgagcctttcatcacgtacatactcgaccgctgtctgtttgaaacccacccagctgactagccctctgacaaatggatttttttcttttaatcttttcatttcatcacagacttttctgtccatgagacgaaaatcccccgtatcaatcgggatatcaatatctgtcataccgctgagaagccggtaaaacatagccgcagtttgttttttgaaaaaggtttccccttttcgtttagtccgcacggcgtacacgacctcgtagccttccttccacttttcaatcatatctaaaatcagttcaggagggtcctgcaaatcggcgtcaatgacgacgattgcattcccctgtgcataatccatacccgccgtaatggcgatctggtgtccaaaattccttgaaaaatcaataattttcactctcggatcgatcaggctgtgctctcttaaaatctcaatactgcggtctttgctgccatcgttgacaaaaagcagctcgtagttttccttcgtttgatccatgacctcttttaagcgctgataggtttcatgaatgacaagctcttcattatacacaggtacaacaattgaatattgaatatgtctgctcatgtttttgcctcctattcatcagcatgtagttcgtataatgttgctgactgattcattccgccaggtccgcccattttgccgttttcacctgaagccttgctgcttgatgtatcagccgaatcagtattttctgttttttgatcagaacttgattgccatttttctgatgctacttcttttccatttttctcaacccattcaacaatgtcattgtttccgcctcttcccattccagaagccaagaagtatttcacttttccttcttttacaagttttttgaattgagtcagtgtgatcgccgggtcagaaccgctgtatccgccaatagccatgacagcttttttcgttttaatgatatatggtgccgctgtgttcgaatcggttgtggcaaataggtattcagctccggagttgttctcctctagatatttgatcagtttttcatttacagtcgcatcagacattcccatgccttttccgcccattgatgcgagctgagggcctgtttcaggcagtgagctgttgcctccgtacagaagtggcgtacttgcccaataaatcggcatcaccagcaatgcgaggagagctgcaagtgaaacataataactgaacggtttttggcgctgtttaaacagcagcaaagcaatcgctgacaacacgccgataacacctaccccgatactccatccaacaccgatttgatcgttgtagtttctgagaataaacaattcaaatccagttgtcgcaataattgctcccggcaaaagccatgctttccagcctgtctgattgcgatacagatgaacaagggcaacccatcccgcaccgacaagagccgcaatcggcggtgccagcatgatgagataataatgatggaaaaattctgcgacactgaagaatccggcaatcggtacaagccacgcaacccagaacaccgtttccttctgctctacagataatcttcttctttctctcgcgcctgcgatcagtaagcctgcgattccaaatatcgcaaatggcagaagccagctgatttgatcagataactctgtttggaaaagccgcagtggaccaggtgttcccgttccaaacatccctgaacctgattgcattttcgaaccggttcctgtaccgcctttccctccgtctccgccgggtccgccttggccgccatctccgccgcttggagggcctccttgaccgccgcttggcatttggccattggatggaggcgccgccatattgccatttgaagatttgtcatcatttgatgagctgctgcttgatgactgattaggcggtgcttgagtgttatcagaagaagacatttcttttgaagcgtctttgtttggcgcaccctggccgccgcctgaattttggcctgtcagccgctggattccgttatagccgaaagccaattccaaaacagagttggtttggctgcttccgatataaggccgcttgcttgcagggatattgtcgacaatgagcggccacgataacgaaacagctgctaatacggctaacgcacttaccaatgaaacgatttttttcttgattgtggcgtttgccgcaatcagatagaacaataagaaagccggtaaaatcatgtaagcctgcagcatttttgtattaaaacctactccaacaacgaaaaatgctgctaacagccagatcagctttccttttctgatcgctttaaagagaagccatgtagcaagcaataagaaaaataccagtaatgcatcaacattgtttgtacgtgctacagctacagcaatcggtgtacatgccatgatgaaagaggcaattcttgctgctgtcttaccgaatgtcggttttattaacagatacattaaaaggacagaacctacaccagcaagtgcctgaggcaggatgacgctccagccgtgcataccgaatataagtgcgctgatggtttgtatctggaacgtaataggcggtttatcaaccgttataaaccccgccgcgtcgaatgaggcatagaaaaaattatgaaagctttgcatcatacttgtgactgcagcggtgtaataaggattcaccgtatcatcattccagatgttatagatatttaagaatgcagatgcgagcaaaatgaggatgaggaaaatatccagctcgcgttttttcttttccacgtgtttttcactccttttggctaacttggaaatagtgtaacaagcaaatatgaataaactattaataaacaaagacaatatttttgccgaggccatttcatgccaatcatcctatatacagctggtttcaagcccttctccaaatcgtaatcggcgatgcgttttcccaaaataaaaaagccttccggcacgccggaaggcaaatgaatcacaatttactggatcggtttcaattttgcttcaatttcagctcttcgatgctcaagatacggcggaagagcgatcgtttggccaagctcatcaagattttcatctaccataaagcccggtccgtctgttgataactcgaacaaaatgccgttcggttctctgaaatacagcgccttgaaatagtagcgctcaactatgcctgaattgctaaagccttcgcggctgatgatccggtgccacccggcaagttcttcttcatctcttacccgaaatgcgacgtggtgaacactccctttgccttgacgctcgcgcggaagatcgtttctttctattaaatggatttccgttgcagcaccgccttctcctgattccagaataacggcggttccttgcccttcgactggttcacggctgatttctgtaaatccaagaatattcgtcaatacgtgtaaagttggttcagcatatggcacagtcagttcaaccggccctaacccgcgaaacgaaaattcttccggaatgccgctctgtttaacaggcaggccatatccttttccttcctcatcagcagtcagcacaagtcgctgcccttcatgatcttgaaatgccattatgtcacgtccggctcttttggagatgccgctgtgcgttacttgctgctcttcaaaacgttctttccagtaatgcagggcttctgtgcttgggacgcgcaaaccaatagaagaaatactgtttgttcctgcatgaaacggtgcaatgcggggaatctcgaaaaacgtcagctcagttcccgggtttgccacttcatctccgtagaacagatggtacatggtcggttcatcctgattgacggattttttgacgagctttaatcctaatactttcttatagaaatccaagtttttttgtgcgtcggccgttaatgccgatacgtggtgaatgccgttaactttcatatgctgtccctccaggttattttatctcgatttcaagatatcatatcatagttgtatatttattgttctaataacaaagtattttattcgcatgagaaagtcaacatatcagcttcaccgaaggttcgttcactttctgaattctcacctcccctctgtaccggctaaaatcctaatacagaaaacacgaactttgtaaataaaaatcatgaattttattcgtttatagatcgttaaaacaggtgtttccacagttttatctgctgtacccaaagcaaatttcgaaaatcagaaaatttattttatttcacttttctaaaatagggtttacaatatgaaaaaatagattcttcaacatgaagcttcaacatcataggaggttaaggacatgcattctgaagacaacggtttgaaaaaagagataggcctcttgtttgcccttactcttgtcatcggaaccattatcggttctggtgtttttatgaagcccggcgctgtgcttgcttattcaggcgattcaaaaatggcgcttttcgcctggctgttaggcggtattttaacactggcgggcggtttgacaatcgcggaaatcggaacgcagattccaaaaaccggcgggctttatacgtaccttgaagaagtgtacggcgagttttggggatttttgtgcggctgggtgcagattatcatttacggcccggcgattattggcgcgctgggtttatattttggatctttaatggcgaatcttttcggctggggatctggactatcaaaagtcattggaattatagcagttctctttttatgcgtcattaatattatcggtacaaaatacggcggttttgtccaaacgctgacaacgatcggaaaactgattccgattgcctgcatcatcatctttggcctttggaaaggcgatcagcacatcttcacagcagtaaacgaaagcatttctgatatgaacttcggggcggctattttagctacgttgtttgcttatgacggatggattctccttgccgctctcggcggagaaatgaaaaatcccgaaaagctgctgccacgcgctatgacgggcggattattaattgtaacggcgatctatattttcattaattttgcattgcttcacatcctgtcagcgaacgaaattgtcacgcttggtgaaaatgcgacaagcaccgcggcaaccatgctgttcgggtcaattggcggaaagctgatcagtgtagggattatcgtcagcatctttgggtgcttaaatggaaaggtgctttctttcccgcgtgtttcatttgcaatggcggaacgcaaacagcttccatttgctgaaaaactgtcacatgtacacccgtcgttccgcacaccatggattgcgatttcttttcaaattgctttggctttgattatgatgctgatcagcaaccctgataagctctcagaaatctctattttcatgatctacattttttatgtgatggccttttttgcagtgtttattctccgcaagcgaacaaagggagaaaagcgcgcctacagtgttcctctttatccatttatgccaattctggcaatcgcgggctccttctttgtgttaggcagcacactcattacagatacaatgagctgcggattatccatcctcatcggccttgccggactgcctgtttattacgggatgaaaaaacgaaaagcaagctgataaaacggttcccttgtttagggaaccgttttttggtgaaacagaagataaaagttgacaggaaaaacacaacttttgatatactttttacgttaagcagaaagtttttgcaaacttgggtcgtttttttaaagcgaagtaggtcaaaataaggagacacgatttatcaaaaaagtcaagatacgtttttttcgactttacctgttttttttcgacaaaaggctatataataatttgatgtgtgcattgttcattcaaactatggagggtttttaatgataagaagaaaaaaagataagttctcactccttttaacagaaattgcaaagaacatagacgaaactgcagaatattttgtgaattttaaggtcactaaccaaacgactcttaaagaatttgcagatacgttaaaggaatatgaaacaaaaggtgacaatcatgttcatgtcatgattaaagagcttaacaaagcgttcatcactcctattgagcgcgaagatatccttcagctgacaaacagcttggatgatgtgcttgacggaatcgaacatttctctgccatgatggaaattttctcaattacttcatcagacgagcatatcgataaattcagcggatacatcagagaatgtgcgaaagagattttgattacgatcgagctgctggcagaaaatcgcttaaaggatattcagcctcacgcaatcaaaataaaagagtatgagcacagctgtgacaacttgcacagaaaatcattaaagaatcttttcggaaatgaaacagacccaatcaaagtcattcaatatcgtgaaatttacgaaacgcttgaagaaatcgccgactcttgtcaaagtgttgccaataatcttgaaaccatcattatgaaaaacgcgtaacgaggggtaaaaatggatattctattaatattaacgatactaatagtcatttgtgctctggcgtttgatttcatcaacgggtttcatgatacggcaaacgcaattgcgacttcggtatcaacaaaagcgttaaaaccacgccatgccattatattggctgctgtgatgaactttgtcggagcaatgacgtttacaggtgttgccaaaaccattacgaaagacatcgtagatccttatacgctggaaaatggctctgttgtcattttggctgcgctactcgctgcaattgcctggaaccttatcacatggtactacggtatcccaagcagctcatcccatgccatcatcggcgctattgccggtgcagccattgcggcagccggatttgcagcgttaaactataagggcttcattaaaatcattgaagcactgatcctatcaccaattattgcctttgtccttggttttattctttatagcatcgttaagctgattttcaaagacagcaacttggcgaaaacgaataagcaattccgcagagtgcagattgtaacagctgccctgcaatcgtatacacacggaacaaacgatgcgcaaaaagcaatgggaattatcacaatggctctcatcacagcgaatttacatacttctgctaatgatattcctacctgggtgcaattcgcctgcgcgacagccatgggtctcggaacatcaatcggcggctggaaaatcatcaaaaccgttggcggaaagatcatgaaaatccgtccggtaaacggtgtttccgctgacttaaccggagcagccattattttcggcgccacgtttattcatttgccggtcagtacaacccacgtcatttcttcatcaattcttggcgtcggtgcgtcccaccgcgtaaaaggcgtaaactggggtacggccaagcgaatgctcattacatgggtcatcacgcttccgatttcagcgacacttggtgccatcgcctactttattttaaatatgatattttaatgtcacaccgcttctgtcaaaggagcggtttttttgatggaacaggaaaaccatccggatctctcgaatacaataagcagaacctatttcagatgtgagggattcgaatatggttttattctttcagatcatggtctggtgcatcgtggccggactggggttatacgtatatgccacgtggcgtttcgaagcgaaggtcaaagaaaaaatgtccgccatccggaaaacttggtatttgctgtttgttctgggcgctatggtatactggacatatgagcccacttccctatttacccactgggaacggtatctcattgtcgcagtcagttttgctttgattgatgcttttatcttcttaagtgcatacgtcaaaaaactggccggcagcgagcttgaaacagacacaagagaaattcttgaagaaaacaacgaaatgctccacatgtatctcaatcggctgaaaacataccaatacctattgaaaaacgaaccgatccatgtttattatggaagtatagatgcttatgctgaaggtattgataagctgctgaaaacctatgctgataaaatgaacttaacggcttctctttgccactattcgacacaggctgataaagaccggttaaccgagcatatggatgatccggcagatgtacaaacacggctcgatcgaaaggatgtttattacgaccaatacggaaaagtggttctcatcccttttaccatcgagacacagaactatgtcatcaagctgacgtctgacagcattgtcacggaatttgattatttgctatttacgtcattaacgagcatatatgatttggtgctgccaattgaggaggaaggtgaaggataatggaacgtgcgtttcaaaacagatgcgagcccagagcggcgaagccgtttaaaatcctgaaaaaacgttcaaccaccagtgtcgcaagctatcaagtcagtccgcatacagcaagaatcttcaaagaaaacgaacggctgattgacgagtataaacgaaaaaaagcatgatcacactaaaaggacaagggaaaacagctcttgtccttattccttttcttaaagggtgacatataataaatacaaacagaggataatgtcaggtgatacagtgaaaaaattggtgaggcgtgtgaagtttgttgattacggaaggtttgggctttccgggtactcgcttcgggtgagggagcgcagtgctggaattataaaaaagttgaagaagaaaaaataaatcccggagcggctccgggatttttatggtctttgatcagcttaattgcgctgcgatcttctctttcgtcgcaggcccgtagataccgtcagcagttagaccgttaacagactgaaaacgggcaactgcgtcagctgttttcggtccgtaaacgccgtcaattccgttgttaacagcgcctttatcagggtaaaaatacagagccgcaagtgctcgttgcacctgaaagacgtgttctcctgatgtataaggtgttgtcaattgaatgataccatcagggagcggatagagctcgggtttttcagcagccgatggagcacttacaattaatacttgaccaacgcgaataagattcgggtcttcgatattgttccactcttgcagctgagcaaccgtaacaccaaatgctctcgctatagatgtaagtgtgtcgccctgtttcacgacgtaagtttggctgccgcctcccccaattcctgctttgaacgaatcccacgtatctaacaattttcgcggacattccttccctgaccaatacttatgagggacgacattggcgagactgatattatgttcagccattaatgttttgatgagccactgggcatttgctgttgcttttgcaaaatcgccatcggcattttcgcaaatttcaattccaatagaagcccggttgccgctgccatttccgtctcccgcatgccagccgttttcatttaaaggcagatgctgataaatttctgtatcatcaactgtaaaatgccagcttgtcgtcgtatcaggatttttcaaatagcgggcatgcgctgcagcatccgctcctactgcggtattcgctgtattgtgcaccgtaatgtaaagcggcgtcattgcgtagcctggacggttatttgcgccaaccggaataaagtcttgaataatgttaaccattttcatctctccttatttcgtcagattattgtcccttaacaagtcgcgctgtttttttcctttttctgttacatagttgtttttaaaccaagcggcaagtgtcgttccaattgtaaatgcgatggaaccagctgaataaagagcgtcagcgagctgattgacctgctcctcctgaatgtccaatggtgatttgccgagcatcagcatggtctggttgattaaagcaattaaaagaagcaccgtcctgatgaccgtgcccttgtcaaacgtgttcatgaaaatccccctttaatgctgcagcaggctgtacataatggcgatggctccgccaatgatgcctgtagacactgctgtaatgatggcacctgtgatggtgcgtttaatccacgtagtgttttcttcaattttgtttaatttttcgttcagcgtcatgatttgctggtcttgacggtcagacacgcgttctaatgcggaaaccctctgctcaagtgctttgtgctcgccttttatgtctgctaagtcctgctgaaacacattcacatctgcctcttgctgcattattcactcctccttcacatgcagatcacctcccttccgagagccaaaactgttatgaaacagcggtcccttttaccgagagagtaccgccggtgatactgacgatctccatgatgacctccttaaaccctttaatatcgaaggcccatgcctcagcttttcctaatgtactcaaagcagaggtggcatcatcagttttcacgcctctgatcggcagtttctgccctgacaccgatttgccccaaaatttgacttcgctcatttccgctgtgccgtagatttcaacgagtaaatgcgcggcaccgtcaacaggtaaagctgccccctcgccggcggactctgcattttcatgaaagacaaagtcaaatgttttgcgagcctcgactttcagccgtccatcgtgtgtttgattctccgcaaagtcaatctgtaaaggcgtttttccattgacacgcacatccatctcacccgcaccgactgattggtataatacaaactcagattgctgaagattcccgttcacatagcggaaacggtaatagcgtttagaaagatatacccagtccgtcgctgtcaggacacctgctgcgacattaactgctgctgtcgttgtccaaacattgttattgtcactttcttctataaagagcgtaccttcacgatctgcatacgcccagcccttcactttcgaaatcagaactgcgccaagcctgtcctgtccgagctgactgtatgcctcagtagcctttaaagcagcatttgttaaaatctccgctacgcctgacaaattcgaaacaggtgtcacaaaatcattttttcctcctcgatagggctttacagcgccggcttttccagtcctatcgagaggaaattcatattgatacttcaccatcttcatcctcctttgatctaaaaacaggcaaaataaaaaagccttactacatggctttaccggtaatttctttatactggtcagctgtgatcagctttttgttcacaccctctgccagatcctcaattgaacagtctttatatgctaatgcttgttttaccatatctgctgtcgcccactcataatagagggcaagcacccaataattcattcggcaagatctcctttcaaggaaagtaatgatagctttatatctgacaactcgttacctaatgttttgttcaattcttcaagctgcttgcgtgccagcttttcttgtgacaattcttgagcgagaagctccacctgatcaggcggctcgtacggcgggtttttttgtgattcctcccaccaggattcgagttctgcctgagtcggcaacggcgcccggagattccatttctcaatgtatgaaccgttcccgtcattacgcaattcaaaatcctttctcgatactgcgtttggatacttgtacataatggcatcatataagatcataaaggtacctcctaaactctcgggtaatttcttccgccaagctccagaacatcaaaataattgagagctccattcgaatctgtaacatatcgtgttacatctccagaataaccaacataaacataaatttcaacataatctcctgcatcaagcggaactgtaacagatccagtaacagttgcattaaactcattatcactgttattggaaggggtaggcattctaaattgattcattaatttatactttgtgccgtttacataaacatataattcaaaattggagtatcgctcagtattttctatatataaactagcactgactaaatgcattcctgcatgactggctacaaacctattgttttttgtatcaaacaatttatggctatcttttataatacggttatatttaattttgttattttctcctttaataagagcttgacgcccagtagtcccaatattagcgtgagcaaaccctgatatcttttgccacgcagtccagccggaaccactccaccagtgacgaacccacgttccagtactatcaatataactatttgattcatttcctgtaccgtaaaaatattgagtaaatctaaaatcactgtatttctcattttttacaattccataaccaagtggataacctgtagtatttccttgaccaatatccattagtgttaaccctggaggatattcattccccccagttcttgcgtcttgtattgcattagagcctgtaagaactgttaatttattattcgtataattagagtcaacatagtttttagcatcagctagcgctttatctgctttggtttgagcacttacctcagtctcgatcttattccagcctttaaacacgccgtctgtatggatcgttgccgtccaaaaggttccgtcataacttctagaggccaaaattgtttttcgtccgcctccctctgtttcgataacatcatagttataccatgatccatctcctgaaacaggattatttgttatgacgttccctaatgcatagtaaaagccagagggtagtgttaacaagtcagtcccatctgggattttagttcggcaaccttgagtatctgttaatctatatagttgtgcattattccatttgtctttatccgattttgttacgtggatatctgttttattggcatgtgcatctactttgatctgtgagccttcaaccgattcgatctcacgccaagatgtccaaacgtctgagttagccactttattcctcatgaatttccttcggccagttgatattgtgtcactactgctataagacgtgtattcttgatatgcatacgtgctgaaattataaaccattaaataaccattgttattaacaggagcatttaatgttgttgtcgcaccactcatgtaatagaatccagtttcgatgacagtattgaaatctgcatcttcacagtactttgcgagaccgttatcctgagttattttaaagagctgtgagtcgttccacttgtctttatctgattttgttacgtggatatctgttttattagcatgtgcatctattttcttttgagacccctctgtagtttctgattcaatccatgctgtccatgttgtagaatcgttttttcttattctaaaaaatgactgctctcccttaattccgtcataagctatttgaacaagtgtgtttttatagctcatcacaaggagaaaacactgatttaggcccggaccgttcaagccgtcattgtatattaagtacataccagtatcggttaaatcattataatcagtaatttcggtcacactcttgtaaaagacccttccatcatcacctgatatcttacttaactgagcgttgttccactttgacctttcagcagcagtaatgtgaatcgtaccatcattcacatgcttgtcaaaatccttcttcgccgcctgctgcacattatctacgttccccagcccgatttgcgcctttgttgtgttgtgggggttgttcatgtcgtttttgtgggcagccaggtcggtgtgggcgtcttttatgcctttttcccagcggttgacgtcatcttcgttgatggggtcgtccggaagccagtctgttttttcttcgtatgccatgtttacaccacctcaaaagtaaatctgaaatcaagtgttctgttttcgctgacgtccaggtcagtctttctctctgtgatcacattgcccagctcgtcaaaaatttgtaccgtttcgatatgcttgatgtcttcctcacgttttgtcagaacggtgacggtcgcaccgtcaatggcgagatctactatttctgttttttggccgttgagcagcacgtgatcgattctgctttttagatcagccgctgtgcgttctctgtatatggttgaaatcaagttaagaccacctcattattgttaagagtgacagaataaccgaccttgagctcactggctgttcggtatctgcgatgattcaggatgactgtgtctttgatttgcagcgtctcgttcaatccgcctctgagcgtatacgccaaatgagcgggcttcatgttttctatcgcttcgatcagctcattcatgtgctggaggtcatcaacattgatatcgacgttaaatcggtattcgccgggaagcaggcggacctgtgcagacgggtttttcaagaaacggtttaccgcctgctcaatggccctgtatgtgattggcgggatgttcgacattttggaaatgagccgcaatcgtctgatctcatcagtgtcgcctgattcccgcgggacgtttaaaattttttcccagcggctgagcccccaagtcgccgtcggtacgaataactgatccgtcagatcaaatatgctgtcattttgtttatcaaactcaggcgcttccgctttcagcagctcagccatttctttaaggctggtgagaaacggcggcagataagctcgcatgtcatcttgtttgctcaatgatcttcacctgcccaagcttaggaatttccacgtcgctcagcaccagattttcagacgtgccgttgatttgaatattggagtagtcactgactgatggtgaattatagacgatattgttaatttgagaaaggcggatgacgttatcttcaaacgccattttcttaaagagatttaaaacgccttcctcaatttctgacttcacttcatcaattgagtgattgatctcaggcagcacttcggcagaaatctcaacttctttccagaccgcgctctccactgtgacaacggctccgattggcgcctgtccctctccctgccctggttcagggtcgatataatctttcactttttgaattaaaatttgagaagcgggctcaagattcgcattcgtgacgacaattttgaccgtgccttcaccgttccaaagcgggaagatctttgccttgcccacaccgtccacttcttcagcccactctttataatgcattttattggcactgacggcctcacgccgaacccttgtaaaataccgttctcgcaagctgtcatctccctcttcctcgcgccccggaatcaggatttctttgacaatggccgtttctaaaccgggaatggtatccaatgacagtaaattgcgtccggtcagattggcgtttcctgcttcaccaggtgtttcacagatgagcgtcccgtctgccgtatattgaaaataaagattatccacgtaaaagcgggagccgacaggaatagtaactccagatgtaaactctcccgctctgacagcctttgtcgcggcagttctttcaattcccgcttccgctgcacgcctgtctaaaaattcgccttgtgcggtatcagaaaaaactagctcaagcacagtatccagccatatataagacttcgcaagctcggccgccgctggggctaacgcattataaatgacactgccttctcttgtgtcaatatctgcggaaatgctgttcagcatacgctccataatcgcttcaaaagtctgatcttcaaacatcttcgccaatcacctcctcaatctcaagcgttccttcatccgtctccaccacgaaggacacatgaaacgcgtcgccttgtttttcaatctcaaaatctgttacagccgatatccggtcatcataaaccagcgcctcttctatcagcctcgggatctccatctttttatacgcatcagtcgtctcatgatctgtcagcacgtcctgaagctcgtttccgacattatggctgtatacggaatacgcatagcgttctgtctgtaaggcgatatacacgaactgcctgatcgcttcaagcccggtaatcagctcattcgtaattcttccgttttcaaaatctattttatacgtttgcgaggtttcaatgacttcgctctcatcttcaaaatcctcaaactccacttctggtgtcagggccatgatgcccactccttttacatgctaaataaaaaccccttcgtactgaagcggttttgtctataccttatctaaaataaaaaacgattgcccgccagtcagagccgcggtcatgaggcgatcccccggctcgagtgcatcgtctcctccggactgcattcgttttgggataatgatggcgtcttccggtatgatcagtttgctgttttcttttaatttgatttccacaggagaaaccgaaacgacttcagccgggagcagttctaccggagactcagcgtcaactgcgccgactgccaaatgttttatagcctcacttaatctcatcaggatactccttccggcatcgtgttcttttcgacaacatcgatcgtcatcgtatgtttcgttcctttaaattcatgccggtccgtatctacccaataggttttcttgatgccggcctctggaatcgaaatatagacgggcaagccgctctgcacttctgggatgcccactgcctgaatatttttcagttcttttttcacgccctttttttcagcaagacgtacatctgcccgctgctgaagctgtgcctggttgatgtcatctgtgaccgtttccgtatattgaagcacaccgtatttatttaagcctgaactgtccttggcagaggctttatatgtcttattgtccttttgccggcgaagcaccacccgagtagcagtgtcgtttatagaagtgctgtattggtagcccgttatattgacgcccgtttcaagcacccatacctctgacggatctggccaagcgcgcagaccgagctttcctttttccgaatacagctggtaatgtcgtcctgtctggcttttcgtctgtttcagcgcttttaatatgatgtcatacaatgtcgtatcatttttaatgacaagacttttgatcgtatggcctgtgtttgcgatcgaggttgtcggtatctggaagtcactcgcaatccttctgatgatctggtcggcccgctgattggaaaacacgtacatatcctggtttttgaccaggtactgcagcatgtcataagcgctgaaggcaagcgtatgctcgtccggggttcttgcaaaaacaatgccccgaaacagctcttttcccttccatttaaacaagaccgtatctccttctgagacactgtaatacgtctggtcgccctgtttggtgacgatggtcgcttcaatggagcgcggcgcctgataacgatggccttcaagcgatacgctttctgcaaccagctcaagccactctgtgtctttaatgacgaacagttctatcatcatacatcacctgtttcattgcggtatctttaatttttggccgggaaaaatccagtggcccggctgcctgatgttccgtttgcttcgtttgatcattgctgttttattggcgttccaaattttgcgccattgagtgctgttcccgtaaaatctgcctgcaatgtcccatagcgtgtctccctttttcactgtgtacgtcttcggcgcagccttcgacggacgttttgcctttgtttttttcttttgcttgattttccgcggggaagcggttttgtattcttttaattgaatatcaaaggaacgatcacctatatcctgctggccttcgctataggaaaaaccttcaatactgcatgttaaattcactttagttcccgtaatcaaaaactgaaccggttttttggccttcatccatttttcaatttttgttatcgcattttccggcgacgggaaggtttgatattcagctattgggctgtatttcttcggaaaaaacgaagagaacgaaatttctttcgcgccttgttcgtcaataaatgtaaggtcaccgaacttggctactttaaccgtctcattctgaaccgtatttgaaatattcagctggtcgggaagaacggggagccgcagcttgtccttcccttgtgaaatccaaaattcatatacggatttagtcaaatgcaacgactcccttcgttccaatattgatatccttttgcagttcatctataagcgcctgcttgattttcgccgcaaggctttcagcgtcctgtccattatggaagtgctggtctccgttaaactcaatctttatttctttcgttccggctgtttgtatcgtttgccgtgtaccggatgtaacagctgaaacttgtcctgaagaaagctcagactgctgggattgagacggatctgtcacttccataccaagagcctgtgccgctctctgaagaaggtagcgaccgcggatgccccgttcctctgggatgatccattcccgcttgtttccttcaccgacacgggcaatttgttctttcgtgatcagcccgccgtttgcataaccgacataaggaccgccacgtttcaggcttttaatgccaggtacattatcaattgagccgtatctgcttttgatatagccgatcgcggcagcagcgttgtgaatcggatttctaatgttacccatgcccggtgctttatgagcattaaatgtggttggaactgtctgcatgagtccttgtgatggatttcccgccttcgcgttgctatcccacaggttaatagagttcgggttgccccctgattcatactgtgcaatcgtcattaatcccgagagccagctcaatggtgtctttgtggccattattgctgccataagccactgtttcacatttccccctactgcacccattccggaataagcagctgccaatgaaccggcttgtttttctgcgtattttttcacatcgacagaatccagtccttttacaacaccgacagaggcaaaacgccccaagctcatcatgactcgagaaggtgaatggatatctaattcttcacggaaagcctgctccactctcttggccatatcctttgctgcttgttttacttcactggatttagaattcatgcctgtcacaaagtttccaatcaaaccggagccccagctgttcgatgtgtcttttgaacgcaggaacggtttgtcaacatgtgtactcacatactgtgcagtccctgtttgggttgaattttgtccttgcgcaaagcctttgaccgttcctgtgccccatgaagacgatttgctcacagtggcttggaacggcgttttaacttttgattgcaaaaagccgtctgttccggttgcagtgccgctttggcccttggcatacccacttaccatttgtttaccgtaatttggtgaagcagaaatcatttgtgtaaatggtgtattgatgtttttctttttccagtcttccattttgaccggctgatcgctgatgcctttaccaaagccttctgaaaattgctgtccgagtgtggacgcttggcctgtaagatttgcagtgttcattactggggaggctgtgcctgatagaggactgacagctgctcctcctgaaacagatgctggacttccgccagaagacgaagctgcgcccatgtcgtctacaacttgcatacccagcttagacgccgcttgtgaaagaagcatcttcccccggcctcggttgttatcaaccgggataacgaattccttgccggcttcaccgatccacgagatggttggtttggtgatgtagccgcctgtggcatttttatctggatccttacctttattcggatcaccgccgccggttacaaaattaattactttactagctacgccgccagctttatcccagatttgcttcacccagccgaacgctttagaaaaagcatctgaaatcgcttctcccacctttgtaagaggttcttgaatattctttttaaaccagccgctcaggcctttccaaatgttcttaacggtgtctatcgcttttttgaaagcctctgagattcccttgcctacatctgagactgtatttttgaccgggttccaaactgtatccatgaaccatcccgataccgtactgaaaacactcttaatcttattccaagcaccggtcattttatcccagattgtagttgccgctcctattacagcagatttgactggcccccacacattactcataaaccatgaagcaactgtactgaacacatttttaattgtcgtccatgcatttacgattttagaccatattgctgttgctacacccacaactgctgatgaaaccggcgtccagacattgtccataaaccatgttgccaccgtgctaaatatcgtttgaatcgttgtccatgcatttacgatgttggaccatatgcttgttgctacacccacaactgcagttgatactggcgtccagacattgtccataaaccatgttgatacagttccccaagtatcctgaatgactgaccaggcattttgcgcaccctctgtaatgctgttccatgtatcttctagagcgccggcatcaattgccttgcctaaactttcaccgccgaaagtaccggcaattcctcctacaacaccgccaatagcggtcccgactcccggcacaacgcttccaatagccgctcctgtagcggctcctgctaaacctccgccggctgaacctactttttcaccagcattatccttattgataccggctaagtcagtaagggacagtatttcgcctaatcccggtattccttttgcagctccttttaagcccttcagtccgccttttaagccttttgattcacccaatgttttcagaaggcctgaaaaacctttgcctgctgctcctttagcagatttaggtgtattcacaggatttgttttattcccttttgttgatgaaccgtttctatttttgacttttttgcttttgcctgtactgattccggcacagcagcaaccacaagccccgccccatttgccgcctgactttttcgattttgaacctgaagatttttggttcatagaaggttttttagtgcggtttgaattgttagaagttgagttctttgtattggcttttgaagctttttgtttgcctttgcttccgctggatttgccgccaaacaacccgccaatatccagattccccagcttctcagcaatgccttttataattttttcaaaaaactctcccactttttcaataattttatcagggctgaatttctcgaatttcttggcgatttttgaaacaatgttatcaacaaacttttctgctttattagcgattttatccgggttcaggaaattaaatttctctgaaattttgtcaacaatatttgttacaaagtcttccgctttagtaataatggcgtctggactgaatttgctggcgacatcatctacttttttcataaaggaatctgtaaacttgtcaagctcgttaaaaatggtttccgggctgaatttacttacgacatcgtccacttttttcataaaggaatctgtaaacttgtcaagctcgttaaaaatggtttccgggctgaatttacttacgatatcatccacttttttcataaaggaatctgtaaacttgtccagctgcttaaaaatcgcttctggactgaatttgctggcgatatcatccacttttttcataaaggaatctgtaaacttgtccagctgcttaaaaatcgcttctggactgaatttacttgcgatatcatccacttttttcataaaggaatctgtaaacttgtccagctgcttaaaaatcgcttctggactgaatttacttgcaattgcatccactttactcatgaacgatgttgtgaatttatccagctgtgccaaaatcgtctctggactgaactttgttgcgattgcgtccactttattcatgaacgatgttgtgaatttatccagctgcgacaagatcgtttctggactgaatttcgtcgctattgcgtccaccttgctcataaacgatgttgtgaatttatccagctgcgacaaaatcgtttctggactgaatttcgtcgcaattgcgtccactttactcatgaacgatgttgtaaacttatccagctgtgccagaatcgtttctggactgaatttcgtcgcaattgcgtccactttactcatgaacgatgttgtaaacttatccagctgtgccagaatcgtttctggactgaacttcgttgcaattgcgtccactttattcatgaacgatgttgtgaatttatccagctgcgacaaaattgtctctggactaaactttgtggcgacttcatccaccttattcatgaacgatgttgtaaatttatccagctctgttaagattgtttccgggctgaactttgtagcgatttcatccaccttttccatgaatgaagcagcaaatttgtccagtgctgtcaaaatcgtttctgggtcaaacatgctcgcaatatctcctgtacctcctgctgaaggcgctcctttttcggagggacctgagcttcccatgctgtcaattcttttctgcaatgaatccagcttatttgacaccttgtcattaatagcgagctcaagtttgttgtcttttcctgttaaggcattaataccagcagaaatacgaccgactgttttcatgacgtgatcaatcacgcgtatcgtaacagagtaaccatttttaagtgcagtttccatatagcgctgtattttttgcacagccggcaacacttgatcttctgcactcagcataatcgtaaagcctttaaaacctgccacgagctctcttaatcgttcaaacttttcggttgcttggtcactagcatctattttaatagatacagatgacggcaatccctgcaattgaacattaacctgctgaatgacactgctggctttatcctcagttgaaatggagatcatttgggcgccaagctttttctttaatgatttttgtatgcgatcaattgtccttaatacagttttgctttcttttcgtacatcaatagcgctttttcgctgcaccatttttctatatttttcaagtgctctaaacccattctgaatctttcttaactttttacttacacggtcttccatttcaaaccttgctgtcagctttgccaattacgatgcccctcctttctttgcttgtttttcaaggagatcgagcttatatccgatcagtccatacaacagcgctttatagtttctgggcgcttcgtagagcgccaataaatctgatggggaatagtgaagctcgtgcatcgcatagtagagatacacggcttctttatgcccatccttgattagttttttgcttcttcttccagatcctctaattcatcttcaaatccattaatctcaatcgctttgtttaaccagttcgcatactcgcctccaactgagagcacgcgtttcgcaacttctaccgggtcagccgttttgtaagcttctcgaagctcttttgaacggaagtccggataaacggttgattcaactgcgattcgggcataaaagcgttggctgtctaaatcttttacacggcctctgcctttgacatttttatacgttgttgtttctttctccaattcatcaatgcgctccgtcgtgatcgctttaaaaataaatggcacgatgttcccttttttatcaacaaaacgctttgagatcggcactttgatttcctcagcttcaattgtttttcccggcataaaaaaggaaagatcatatacgttttcgttcttctcgctcatgtaaaaaactcccttgtctattgtttggtttcatctttaaaaaacagacctttctgagaaaggtctgcgtatgtgctgattcagctttgattaaaacgtgtcagacagcttttcagggacgtcgaagtcttcgaatgtaaatggaacttcttcctctaacgcttctgaatcgacatcaaggcttgcgattttggcagagtcaaagttgacgtcgtacagcgtgactcgctctgtgccccggcctgaggattgatcatccagcacagcttgaagtgtgaaataagggtcgctgccttttttgacatagtccatcatcaatagcacgaattttgatgtgactttgtagaacgttgcggtccctgttccatttgcccctgttgttttatggcctgtcatgcggcggcccataatgttgacttcggatttgtttttctcaacgtttgcttcaaatgttttgatgtgcgccatttcctcaccatcgagaaataagcggccttcttttcctgagattgtgttttgtgcttttaatgccatattagtttacctccacattaaagtagaatttttctgctgcgtcgacaggctgtacagccaggtcaatcaagaagccgtcacgatcttcattcattgaaattgtgatatcttcatcggaatcaaagccagtgatgccgcctgcatcctgaagtgttgtcatgtattgcgtgatcatcgtttttacatactgcagtccgtcttcagatgccgggatatcgcttccgctgccttttcttgatttaattaaggctttcagctcgcgtgttaaatcattattcacagcatccaggacacgaacgattttgttcttcgcaaatttcttgtttttctcagctgtgaacgtcacgagtgagttaatgtccttttctacgctgacggatttatcacgggcgtcgaatgtgaataaaaattcacctttacccagacgttcaacaatcgtatcgtggtcaaggcggtgtaacacatcaacggcgccttcgtactctacaaatgtgagtgattggttaaaggttgctcctgcactcgctccagctacccaagctgttgctttgtcgggtgtaacttccgtgccatcttcaagcagcacaccctcagttacgttgatgatgccttcataatcaccggcataattggctgtgacgccttgcactttttgtccttggccgtcgcgcaggcgtttaatgaaagcagcaaacgtcgctttcaactggtcaccttctgcaacaggcagcgcaatcacatcaaagctctccgtttcagccgcggctaagaaatctgtatagtcagagttgacaggggctttatccgtaccgccagataaacggatgcccgcggatgcattcagcgtctcagctgcagtgtctccttctgatccagtgagaggaatcgttgaagaaagatcgcctgttccggtaaaagtgacatagccgttagctgttaattcttcagcctttttgacagtctgtttatcaacctctgattcgtccatatatgttgtcaaatcgaaagaattagcatccagcacattttgattgatgcggatgataatgtcatttccttttgttccgccatatactgcagttgctttgacgccttcagcaatatcagcagacgctcggacaccttcggttagacggtacatcaataccgttttcgcatttttcttcgcttcacgcagcagcaataaagacgggtcatcgatgctgaggcccacttttttgtttaggtcttcaacactggaaatggagacgaacgttttcgcttcgccccagcttgatgcgaccggaagtgcgactgttccccgttcactgagtgatacccgctcctgtgccgtcgttttaaagttaaaataaatgcctgcacgttctttttctttgcctgttgtaaatgttccgccattcatgatgacatgacctccttggttagaaatgtttgaatcaattggttggcttctgatttcgtcatgcgtggttgatccacgccaaataaagccccctgaagaatatccggcttaacgccgaacagttccttcgcgtgcttaatcaaatccgctgtatcaaatagagcttcccggctctttgtatgtacagccttcttctgttgtttgtcctttgacaccgtttatttcaccccgctgttcatgtcgatatcctgtaagacaggctgttctgttttgtgataataatatcggctgctccacctgatcaccatggccgcctcgcccctgtctcctacccttgtctcgatttgggagatgcgaaccatatcccccgtcttctcaccggattcactcagcagcggaatcatatttctcgcttctctgatggcatccgcgagcctgtccgcttcatccagcgcctgaacggagtccagatgaaacagttttacattgagactgtaggtttttttaaatgtggagaccgtatctgtttcctcgaaaacagatggtggcgggacgtataacgacggcacctgaaagtgatcaggaagctcgcgttcataaatgggaacagaccaccggctgtacaaaaacgccatgatcgatcctgtttcactgttcatcctgctcctcctttacagcttcttcagccactggcgcagtttgctttccagcgatttttcaaacagctgttcatataaaagcagtgcatgatcccagtagcccgtgcccggtatccattttctcttgagcgccattcccgttgaagccgctggatcataaataaactgtgagccttgaaaacgccccggcacccatctcacatcttgttttgacgtccaatggccgtcattaagaaatgaggcgtaatcaagctgtgtccccacctcaagcgaaagcccgccgctttgcacaatccagagattgtcctctgcgcctttctcaaaggaaatgagcagtttttctgtatcaatcgtttgtgtgctgatgagttcagattggacgatctcgagaaaatcttgcccgcactcctcaagccaccgggacgcctgtctggaaaaaccgcctgaagccgattcttttaatgccgtgttcagctgtttcaatcccgctattttcataggctttcatccctgactgcgacgacctcccaatgatgatgtctaatccttttcggcagctttagtatatatttatgattctcccaaatgattttatcgttcacgcggatgtccgctgacaacggaaaatggacgagaaagctatgatatacagtttgatccggctcctcctgaatcagctgctgcgttttttcggtaaaataacaagggacatcttgttcatcgggtgtatccggatatgaaatcaccggctgcagcctgtctgccggaatcccaaatcggcctgcagacggcgcttgcgctgcttcatgataaatgtcgcagcgatgaatgagcatctgcctgtagctcataaagacctcaccttcagtctggaggattcaggggcgtagcccggcgtgataaactcctcgagcaaatgatatacctctggccgctgaatgccgccttctccggaaaccgtgtaggaataatcccccattttctcagactgatagcttgatgaggcagattcatcgctgttgacaagcgcaaaatactgggcaagctttactaaagccaacttcaccttgccgggcagcggatcatacaagctgtcttcaaagcggtggcccgtgatgagagccgcttctgcttccgcctcgatgatatcctgcgccagcagctcttccggcctgtttttcacccgatcatagaccgaataggaggctacgtcagtcggttcaatgagcatgagctgaccacctcgtttctattattcttttacgttaattaattttgcgcaggcatcctcttcctcgaacttgctgtccagcttggccgttaagacaataatgaatttacgggagcggatgtctttgtcgacttcaattcggatattgcgggagaagccgagaatgatatttttcggatgtgtgagaatgatatcagaagcgtcatattgcgcgtctccctcaccgactgtgtacggctgaatattggatacccctttgaccggtacgccgaatgctgttgacaagccgccctgaacagcctggtccccaaggtttgtctggcggtctgccacgcggtccttccattcaacttctaagccatgagacgtatagaatctaaattcctgagggatgcgcaaatattttggcggaactgcctttaagcctttcttgaatgtcgctctggacagttcttcaccgttcatgtcaacgatatgggaaactgcctgtttgcggatgccgtccagctgtgccagatacggatcagctgatgctgtatcgccgttaacgatcagctcttcaatatcaactgctgcgcgctctgctaaaatttgcatgattgtctgctgcaggccgtctttttcaatattgttttcaagtgtgtcatacgtaatgttgatttccgcaatgacttccttcgtgttcagctggacagtgcttgtcgttggaactgtcagctcgtcgtttgacagtgcttttccttcttgcgcagcccgcagaatacgctggccgaagccgattttttcaaatttttgcgaatcattttccatttgaatcacgcgggattcactgaaaatggtcggcgtgttttgcaccatgcggataaaagccgatgcttgcgcagggttcataagcccgccgctttttaaagcagaaagcgacatttccgctttccgaatgatctcttgatttctcaattgatttcctcctccttgactggttttacagcagtccgctccagattgattttttgacttgctctgtattgccgcccgtatcgtccgctgtctgcttagacgcgcctcgcgctttttccaaagcctcgatgcgttcgatcagcggagcaagcatgtcttcaacgagctttttcagacgctcgtcatcacccgtctgctccggcttttcctccgtgtctgtgtttttttcaatccgctcaagccgtttgagcagagggtaaagcgcatgctcgaatgattctttcatgtcttcttttctcatttcttcagtctccttccctgttttgtcagcaagcatttgcttgaatacactgaagaatcccgctttttcaaccggttcttcctcatatacatctgcagtgcccgccatgctgtagccggtgatgattccagccttgatctgttcccacacctcgtctgacgctcttgtcacgagcacccatgagccctttgtaatccgctttgacccgatcataaaatcatcgggcgccacataggactcgaccacgacgccggttccgccctcaaagctgtgattgatatcaatctcccgtgcctccgcgagaaaaccgtgcgccgctttttcaatttcctcggcggtcataaaatcgccgtgggcatcaggaacatcaggctcatacacgattccgtacacgagcttttgttcatcctgctcactttttgtaaacagccgaacctttttttcaaatgacggaggttcggctgacttggtaaagaaaaattctgtctggttagccgccttgtccacataactgacaaagctgattttggcatttcttaattctcgcgccacctgcttgattcacctcccttcaggacgttttgatatcttcgatgctttctttcaactcctgcatgagcgcagccaggtttgtcttttccgcatcctgtcctgcaggccgtttataaatgtcctccggccactcctcaagtgtttttccaagcacccgtccggcaaggtcgcgtaaatcattcggtgagactgctccggctgtaataaaaggaccgagcaccttcgcaatctcaagcggatcacgaaagtccggtccttttaatgtcagcctgacgtcatggatattcagctccggcaaaagcagcgtgttcagtttattcacgagcgtttttcgctccggctgaaagacctgctcctccgtaatttttctagcagtatccgctgtcgcccggttgtattcctgggcctcgcctgtatacagcggggggagacggaacgcggaacgcagcttatttctgcttttttcatcgtattcaagaaacaaggcgtcgttttggagaatttcagccaaagatttgatttccacggaaaccggcgtaatatcctcgcctccatggagatccttttcttttgcgattccttccgcttcgatcaggagaaatttatgggcgttttccacgccttcaagatcattcatgtattcctgcagctcccggtaagaagcttcagacagcatcccgttttccactgtaatcgcagcggggacgtgacgtccctgcttaaaatacataaaattgagctcttctgcttttcgggccccgtataaattgacaatattgccgatccagcggggtacaccgtatacgccgcttccgattttgaggtgaatggcttcatttgcttgatacttctctgccaatgtgtttacatattcacctgtgcgcatatccatttttcgcggatcgccgtattctttaaaaaatactttctttccattgatcatctgcacatattttcggaagcgtttttgccttttgatccttttcattttcccgttttcttcatatacaaatgaaacctctacaggctcgcctgctccgcatacacgcatatatttcacatctaaatattcgatgccggcaggttttcccgccccgtcgcgaagcacttccataaatccgttgcctgttttttctctgtcttcgatggcatagcctaaaatcatttcagctgattcatcaaagtgaagacatttataaaaggcttcgagtctggcccagtctttttccgctcttttcttttttgcctgatcgacatcacttgcgttgacatcaaatgtgtactcaacatcgaatccaaagcctgtaatattcactctgtacgcatcaatgcattgctgaagaatagtcgagtattcggcaatggttttgagttcgatgatattgtagggcggagcgataatgtcctctccgtacagctcagaaaagtcatcctcatagatttgctttgtctgaggagccgcggcattggctttaaatacagttgctctgactgtttgattgtgcatgatttatgacctcctcctttctctgttcggccggattcgtttgtgtgctgtctctttcatatcagcaacctcataatcatcaagcgcataccaaatggcagaaagcgtatgcgggtcaatcgtgaattcatcctcaatcagagctccgtttttatctttggcatacgtaagtgtcttgagctcatagatgacattttcacagcgatccgaacagaagatttttttgaaccgttttacctttttggtatattgaagcctggagccgggaaactttctggctccaaccatccgaaagccctgctggcggaaatattgaatgcttttcggctcagccgagtcggctttgatcaattcctgtgtctcaataaactcacgcagctcctcagccgtcctgtcatctgtcattttgttttgataatactcccaataaatgtagaggtattttttttcaggatctacagcaagccggacgacggcattataggattcctcgaatccaaaatccatgcctgtacgaaagattggcttgctgatggctgcgatacattttttcatttgattatgcgggagtacctcgaactgcggcagcaccctgatcccattgacgccgaatcgtcctttgcgggcaatccggtacaggtcgggatcatactctttgagtccgtcaagctgtttcagatagctttccgggagaaaaagattgtcgttagcggtggaatgatggtaatacgtatctccctttacaatcgtccgcttttcgtaaagttcgctgtcatccagcacaaaccgtttcttgcgttcatcccgaaaaaaatgcctatacgtccaattggaggtgccgacgggattggtggtacagatcatatgaagctttagctcaggatggcgaagacgtccgattaactccttgaacccctcatacttcacctctgagcactcttcaatccatattaatgaaatgttatgaaccgattttaattttgccggattgtccattcctttgaacatgatccggctgccattgtgaaatcgcagctgcagcggggaagaaagagatgccacggcctttgtgagaccgagctcttcgatcacctcttgaaacaaggcgaaggtcgaatcccgatgggtatcgaacacctcccggatcacaagggccgtccgtttttccttcagcagctttagcacgattttcaatgcggtatgatagcttttggatgagccgtagccgccgacaagaaactggtacgtctgctcccaattgaacacgtaatcttcgaaatgagggttgatttcttttacaatcatgacttgcgctcttttcgtttgatcataatttcaatcggctcctggctgtcatctgttttctccgctttttgtttggcaagcttcaatttctcattttcaattttttgtttaaattgatctggaaacaaatcaaaatataaggatagcttctcaagcgccttcattttatctgcaagcttgatggcaatgccttctttcccaagctttgcttccgttacaatggtgccatcaacgagcccggagtctttgacatcgacaaagctgatttccttcataatcggattatcatcttcatcaaacagcggacccgatttcccgacagcctggacctctttttttccaaaggtcacatagtccgtaatatccgcaaacgcgatcttgatataaacctgcagcacatccatcgcttcaataaacatttcattgaccatttcttttttaatgcgtctaatttcagcagcgaccttttcgttttttaagagtcggctgcccgtcacatgagcgctgtccggagaatagcccgctttgattgctgactgtgtggcattgaagcttttgacgtaatacaggcaaaacagccgctggcgttcatttaattcatcgttgtttatagggcgctgtttttgttcgtttttggacgcagaaaacagcgcctctttccatttgtcttgttttttccagatgccgattgttttcgcggaaacaccgattgtgtccgcaatcgcccgatttgtgatctttccttgatgttgttgatagattgctaatgcttgttcgcgctgttgtgttttcatgctactgcatcaccgccacctccagcatggttgtttattcataaaagcggctgatcagccagccgcttagtgtcatgctctattcacttataggtggcaaacgtatgacaagctttcaggcaagtgatcgattcatttcttcctgctgtctttgcatctttaaactcgcccgtttaatcgtcgtttgcactgtcgatttttttacgccgagaagatcggcgatccgttcataagaaaaacattctaccttatgcagcaaaaacatttccttttctctgtccgttaacagggctaatgcttctcgaattctctctctgtcttcttctgatacctgtccgtccggctcaaacatcatagcgctggaaaatgattcgatgattctcgggtccttgatcatcagccgctggtaggcatcacgccggtcaatcgcccgtctgatgccgggctgccttcctttttcaagccattctgttacatattcaagatcagtaatcatatttctgatgatttttttatccttcagctcttcagctgagagcacggattcatctgcctcagcgagcggtttatattgtattcttgtttgtttgagcgtgcgtttatattcaaatagtaagtcttgcattctatgatcctcctcatttttggcaaataaaaaacggacaccaatcaacgcacaaatgctgtgcagttgatcagtgtccgcaggctttccgtcttggacgtattctgttttcgctttaatttaatttgtagccgatttcaaattccacacgggcaagatcgccctttcttgtttcgacgagcgtttttccatgctcgggcgcttctgtgatccatgcttcttgcttgatgccatccacaataatgacacggattttcccttcctccagctggctcttaagcgtgatggaatcgatatgcagcagttttttaggatgaatcatgtttcttttcctccccttttcggtgcagcgcttgcttcagctttttctaatagctgaatgatgcgctcctttgaatgaacagaattccctttcagaaaatcaagtgctgctttagacgcttccagcaattcaggcgcagcggccatcaaaacggcattgcttttttgcgaataagagctgaggtcaaatacagctgcaatcagccgcccgtttgagtacggaaatctttctttttcttcttcactgtaagctgaataaatatagatcggtttcgtatccccgcacgggacagcacgccacggcgcagggcttttctctgcctgttttgtctttgccaacactttcacttcccgtcgtccttataccattgttcaatgtttttttctgttcgctttgctcgaaacagcaaagcgattagtgcagtcagctgtttaatcatagatattcagcctcgtttttcccgctgtcagcatttgctccagcttttgaatgacaggcgttaagtcagtgccggaccggcagttcggacatggatgaaaaacgactccaataccggtatgttccacaatgactttctttgtttgacaaagcttacacattatctgacgccctccaatctatggttaagctcgtaggctgctcctttgataatcactaaatagtcactgcacatctcatagattctcgtgccgagcgcttcatcgacccgtacaagtccttcaattgtcagctcgctcgaaagcaaaatcggtttatgatttaagtagcgataattgagtaccgaatacatttgctctaattgccaatctgtagcgcggggtttgccgttaaccggtttaaacaggtcatctatgaacagcacatccgcctgcttcatccggttcagcttcgcttctaatagggcaaaatcatttttcagatcagtaaagccttccacgaacggaaaataaatgacaggcacatagcatgttctcattaattcgttggcagcggcagtcaaaaggtgtgttttccctgatccgggctgtcctaaaagggcaatgctgttttttcggcaatccttgatttgttcataatcggcaacatactcttttatacactcaaatgcgtcttttatggcctgcggctttccctccgtgcggaattccttgaagccgagctgtctgaaagcgtgggtaatctcacttgcacccagcagccgcttcactttccgttctgccatgcagctgcacatcgtccagacttccaggccattctgcctgacgagataacctccctgatccttgcagcgcaggcaatcatacctgcttgcgtctgattcggccggtttgtccgccagtaatggacgtctccctcttctcagctcgtccaaaatctgttcgattgttcgttttgtcatgttttttcatcctctcatgctgaattgcggcattctttttggcttgctgcgcgaaaaatctgtcttcaatgaatttcgagcagtagcgaaaagccttgattgtttcagaagcggcggtccgccggttttcaaaagtctgaaagcattcttcaagccatttgattgtttgcatgacaggaacgccgatggcaacaatgcgggcgatggcttgataatctcttgaggaaggatacacggtgcgtccttcttgagccgaccgtaattgtgtaaaccgcttcgcaatgtgatccactgcatcatcagcagcagtatatttgtttgttttatctatatctgtacggtcgtttgtgtccggtgtctgcggcgaaaatggccgttcttttagactcccgtgtacagtattgtccgatctgaagctgaattttttggaatgcttgaccgaaatcatcagtccgtatggcgcacggacggcctttatgtaatcatggttttcgagaagctccagccatcttctgacggttttttcacttacgccgaagactgccgccatttctctcgcttttaacggcttatggccgagtacgatgccccagcttaccccgtctttttcgatttcttttgttgttgagctgataaaccagagaaacaaccatagcgccgggcccattttgtcataatgttctgaattcaataaccctgaatacgtcggaaaaggatagcttttatcgtttttcattgtacgccgcttctccctttaacatcatgtatgcttgaaactgctcttgcgtttcaaagtggaacaccggaaggccgcatgccgtaaacgaaatggtgccgccggattgtccgagatggcgctgatctatgggattttcactaaaaacaatttggattggatacatgtgatcactctcctggtttgttttcgatacatttcgtatcaactgttaccaagtataaacgatacgaactgtatcatcaagttatttttgatactttttttatcataactttattttgatacatattgtatctataatcataagtaacgtagggagtttaaaaaagagaggtcatagtatgataggcggcagattgaagagtctcagagggaaaaggacacaggaagaaatcgcatcacacatcggtgtgtcacgggcacgatattcccactatgaaaatgggcgaagcgaacctgattacgacacactccaaaagctggctgattactttcaagtaacgactgattacttattaacgggaaaagacaaaaaatccgatgacgatatgttctcagatccggacctgcagcttgcataccgcgatatgcaggatttttccccagaaagcaaacagcaggccatcgaatttatcaactatttaaaagaaaaagagaaaaaccgcaaaccgaaaaataaataaatcgttctctgttctctaaaacatataaaaagtagaccgatataaagaaaaaagtgtttattttttaaagaaaagggaaagatttctacactactttccagtcctatacgggcttttctttctcgctaaaaacagaacaaacgttcgaaagggagtattcaattgggcgattacttatcacatctggaggaatacgttaaaaatttatacggccggctgggcatcacatcccctcatcacattgacatgctgaaaatcgcaaaggatctggatatttgggtgcattttgaggatatggggagcatgatggtgaaatacgacggcatgtacagtatcgtattgaaccaaaaaaagtcacgggaagagcaatgggaggattttggccatgagctgtgccacgtgttaaagcatgcaggcaatcattttcagatgaacaagctcttcagagagcttcaagaattccaggcaaatcaatttatgtaccacttctgtgtgccaacctttatgctgttgcagatggaactgccgcaatggagaagccaggcactcgccacaattgcggcggtattccgggtaacaaaggaatttgctgataaaaggcttgacatgtttgaacggcgtaaagcaggtattcaatttcagaagcggctcgcttatttattatctcacaagcggccaaatgcgtacgaggaaggcgatcagcagcacttgcaggtcgctgaggaaaaagcgttatatcatattggcaaaaacatctgatcaaatacgggctaaggatatattcctcagcccagaagagaacctaacatttcgacattgggggaactgtattatgcagccacatgggcgccggtttaagatgaggcgcagatgcgaacgcaatcggagccgggatatacctgaattcaccccggccgtcaaaggcttccccatgtgcccatcttccttgcgagctttcatcccccctggaaaagttaaacaaatcataggagacttcttgcttttcgagctcacgcgggaacgtcgtcgggacgacaatatcccgttctctttcctccagttctttaatggccgcgtaccacatattttgatgataggtatcccttgcaatcaaaaatgacagcatatctcttacccctggatcatcggtcatggcataaagccgtgtcacctgaaggcgtccttgggcctccgcatttaagttagcgcgaaaatcggccagcaggtttccgcttgagataatgtattttgcattccacggatagccctcactatctgatgccatcgcccccaatccggacacaatcgcgtgctgaggattcatcccggacatgactgctgcgatagctggattgcttttataagcatcctcctgtacatccgcgggtgcattgtccagaagcctggaaatcatcgttgccagcatttctacgtgcccgatctcttcggtccccacatcatataacaaatctttatacttagcatccgccctgcagttaaacccttgaaacaaatactgcatcatgacgctaatttcaccgaattggccgccgagcacctcttgaagttttttcgcataaaccggatcgggatgagctggctttgcttgatattgaagctcttttatatgataaaacatgaatcattcctccctacactttcgcacaatcccagcgtatgaaggaataggctgacagtgcaggtcccgtttcgttttatgtataaaagccaagcttgacggcttccacatatcgatcaaacaagtcgttttgtatgtagcttttatcacggcacccaaaattgcagaacagcgcgtttctttgtgccgtgctcacctccaattgcagccccatttctcttttcgtccgattgacaatattgcttgggtgtacacctgccaagcggtctttctcattagttagctcggcgctaaaacccgcttcattcagacgctcacaaatgagcttggctttttttcgatcagccccgccgaccaaagtatgcgggatgtttggatcataatacccgtgaaacgctaatgcgtaatggtgggcattcactttttctaaagccagcggctcatcaaaacgaatgctggtgagatgcaaggaacgattgtttcgctgttttacaccctcaaacaaatagatggagcatcgatccgaaaatgcccgcaccaattcactgacgccaggctcaattctgccgccgtggggaccgaggacgataagctcacttccgtttttctcctcataaataatccggtactccgactcagaagcagaaagggctgcaaagctgtcatacatatctttcattttgaacgccccctttaccagtcagcaccagtttactctactcatctatgaatgaaaaccttttttatagtatgatttgatagaatacgcagaggaggtatatgatggggtttattgatggattactcggcaatgcgtcaacactgtcaacggctgctgtaaaagaagagcttgctcatattttacttgagggtgagaaggttgaagccgcgtttaagctggttcgcgatttgattgtcttcactgacaagcggcttattcttgtggacaagcagggaatcacaggcaagaaaacggagtttcaatcgattccgtacaaaagcatttccagattcagcgtggaaacggccggccgctttgacctcgattcagagctgaaaatttggatctccggcgcagagcttcctgccgtctcaaagcagtttaaaaaagatgagagcatttatgatattcaaaaggtgcttgccgcagtttgtatgtaagataaaaagacggaagcttcacagcttccgtcttttcatttacagcttttcctccagcttcgctttcgttttcggaccgtaaatcccatcagccgttaaaccgctgacagactgaaaacgtttcactgcatttgctgttttcgggccataaacgccgtcaacgccgtgatttttcgctcctttatcaggataaaaataaagagcggctaaagcggtctgcacctgctttacttttgtccctttcgtcagcgggcttgtcactttgatcacgccggatgggagcggatatgaggatgcggcatggcttttagaagcagatgccgtctgaggcagtttgatcacttgtccgactttaatgtaattcgggtcagtaatatgattgatgctttgcagcgttttcacactgactccgtgtgatgcggcaatccctgacaatgtgtcgccttttttcacatgatatacagacgctgaagaagagactgcagcttttttagctgataagcccccgtttaattccttttcaattgccgccttcacttgatcccagcgcccctctgataaaatgcggtgcgggcaatactttccgttccagtcctggtgctttctcacacgatcgatgccccagccgcgctccttcaaaagctgtgcaacaaatgaaatcgccaaggcttcagctgcctcatacttcgggcctcccgatttgctgtagcaaatctcaacgccgattgatttgcggtttcccggaccgtttgtgccgtcaccagtgtgccaagcgtttcggttaagcggcagaccttgaattacctcttgatcatcgaccgcaaaatgaaagcttgtcgagcttgtgttcccgatcatatagctgatttcattggccgcggacgcatcgtttgccgtgttgtgaatggtaatgtattcagcggacattgcattaggacacttcaacgcgtatttcgcctcagaaaccaaatttttctttactagaatgctcacctatcatctctccttttcttttttcataaataggtggcattcgtaggacgaaaaactcatatcatctatcaccgtaatatggataaatgtgttaaactgaagttcacggagggtctgaatatgtatacatatttaatgctgacaatgagaacggagaaatttaatcaggagcatgtggctgggcactatgaatttctggatcgtttacaagcagaaaaacgattaaaaatgtttgggccattcagcgacgccacaggcggagcgtatgtcatcgaagcagattcactgaaagagcggccatgcggatccgctggtggcaagtggatcttctgagctgacgataaaagaatggaagctgaagaaataaaaaagacccctaagggtctttttttatgcatcatgtttgattgcgtgccgcaatatgaaatgttttcccttctgtgtttgctgtttcacctgcatgaaccatcacctgagtaaagctgaacccgaccgcaacgagcaacaaacctgacatccatttagatttcatataaacaatctcctctctggatttgtttttgtgcgtgcaccattttctcataaaatgaaagtgctttttcgggctgtccgttttctatatagaattgggcagcatcatgcgccagctcttcaatataaggatacagcatatgttcttcaagaaattgaaaggtgtgtgagaccgattctgtgtcaatgttttttccgtataacgcatgtaaaaattgaaaaagctccacgaataattcatcactgtattgacgggcgatttccaatccttcacgatactttttttgcgcttcggcgtcatttttttgtttatacagaacttgtgttaaagagtagatagaatgcggaagattatcgaacttttccgacttgcaaatagaaacagatttctcaaagtattcggctgccttttgcagttcacccattttctcatagcagtttccgagattatatagggcggaactgatcaggcggggattgccttccttctttgcaagatctaaagccagttctaagtggggcaatgctctttctggatactgcatatcatcataattacctgcaataacgaattcacattggattctgcggacggtgtacgtttcatacatttggtatgtttctaatgcctgaacggcgtagctcatcgaaacataggtttgttttaaattgtaaaaaatctcagccattttaaaagcaaactcggctttctcaatatcatccgagacgagggcaagattcttttctgcccgtttataatacatcatggcactgacaaacatcttctgcttaaattcatacattcctcgaaaaaaattaaagtaatattcgagaagccctgtcagcttgtactgattcccttcgatgtcttctaataattctgaaaactctagctgcgacgtgtcctctccaaaaggcttaatgtaatccagcatgacacgatgcctgaactccattaaagaataatacagcagcaaatcttggtcttcttccatatcctcaatttctctttctacttcgagcttgacccgttcggcttcagcgacgtggaactgccggatatgagtataccattcattaattttaagcccgacataagaggacggaatcgtctgcttcatcctcaattaatccccccttttgaattacccgagatatgtcatattttatcatatttacaagaaaaagaagaacgcaaaataaccgcaattgtcgaatttcggctaaccgcaacaaaaaagcacgggtttttcaaacacccgtgctttcttttagtgaaaaccgactttgtttctttccatccagcttccccgctggctttttctttgctctcctgtcatgtctttcaccatggtttcaatatggtgattcccttcttggtgccattgaagggctgaagatacatataattctcccagctgtgcaaaggaaaagccttctgtaagttttgcggcgttttttatttctccttcactcaaaaagatgccaaagcctctcattttcatatattccagccgcagctcttcatccggaagcccgatttcataggcacggtcaaatcgccctgcacgattcatcaaacctggatcgatctcttcgggatagtttgtcgtaccgatgagaaatagcccctcttttgatgtcgcgccgtccagcgtattgagaaaaaaggaccgcacatcttccggcatcgaatctatatcctcgatgaccagaactgcaggagcgaggcgtctcgctgcctgaaagacttcttctattgtctcgctcgacgtaaattcagtaatttgccaataagcaacaggtgcatcgatactgcctgcgatcgacttcactaacgtcgtctttccgtttccaggaggtccatataacagaatgccgcgcttgtaagggatgtcatatgtttgataaaacgatttatcactatgaaaaaactgatcaattgatctgtatatctcctttttcaatagcggattcatgatgacttgactccgctgaacctctctgacaatggcttcctgctctcttgaagtccctccatctccatccgtaaacacggtcactttccgcttgcttttttcccaaagacgcggtctgactccctccagaaatgcacgcatcttttcatcgttaaccgcaaacagacaatcaaaactcataatgctcccatcttgaaaatatggaattctggcaaaagcaactcccttttcaggatacgcgtatacactgtttcttatagacttatggacggtataatccggttctttctcatcttcatcgtaagcaaaggttttcttttcaagcttttcaaatatatatgccacatgctcaggctccaatgaaccgctgcggacatcttctacaagaagctcccagtattccgtatttggatcatcactggcatagagctcatagaatacaccgtattgatcataaagcgtttcttcaatccgtgtgataaggtaaccgaaagtgccgtagcccgccgcagctctttcattctctttttcttcgtactgataaatgaaaggtatgttagtcatgtttatactccatttcatgttttgtgaacgttatatatacgattgacatagcattttgtttcatcccacagcatattacttgtgaattcataaccgttgatataggatttcattgcaccatttatttttacatatggaggagatcataatgagccaatccaatcaaattgtcagccattttttatcccatcgaaacgtgaccaatgagcttgccgaaaaaatcagcaaagaccattacagctacaaaccggcagaaacatcaatgtcagcagaagagctggtcaaacacattcttacgtctttccacttgttcgcaaatgtcattaaagaaggcaatgcctcaccttttcaaaacaagcaggaagaaacagaaacagatctcaatgttctggcaaaaacatatacagaaaaaacggccgctatccttgaacagctgactgaagagcagctggacagagaaattgatctgacatccgctttcggcagaaaagtcacaggccgcgcgctgcttcagcttgcaatggagcatgaaattcaccataaaggcaacctgttcgtgtatgtgcgggaaatgggccacactgagcttcctttctatcagcagcgcatgtagcgtaaacaagaaaaaagatacctgttaagaggtatcttttttttgcgcctttagtacttctcgtccagacactcattatagggcaaatgaatagagatattgagcataccaaaatttcaagcagctaacgtacaaaaattcaaaaaatttaattgattaacgcgtcccaatcatatataatctgataaaaatagtcgggttttcaggaggcctttatcatgagtgtaagcatcatattgatgggtttgtttgtcggagccttagtcggattgacgggagtgggtggagcggccttattaactccccttttaattgtgcttggaattaatccttccatcgcggtcggtacagatcttgtatataactcgatcacaaagctgtttggcgttgcctcccattggcggcagaaaacgattaactttaaattggtaaaatacttagccatcggcagtattccgagtgcttcgctagccattggcatcttgcatttgttccccgcctttcaccagcatcaggaagaaattattaagcacgctctaggatatgtgttaacgctggttgccatttcaatcatcgttcgtttgtttttggatagaaaacttcgtcccaaccgctggcagctgatgccgcttgaaaataagcgggcgctgacgattcttattggtgttgtgtttgggtttatcgtcggcttaacatcaatcggttctggctcattatttgcaatcgccatgatttacttatttaacatgaaagcgtcacagattgtcggaaccgatatcgcgcatgcatttcttcttgttacggcagcaggcattttgaacgctagcttcggaagcgtggattacatgctggcagctaatctgctcattggttcaattcccggcgtgctgatcggaagccatctttcgcctcgattctccccgcgtccgctgcaatttattatggcgtccattattttagtcagcggtttaaaattgatttaatgaagaaggctatccgcttgaaggatagccttttcttattatagcgtcacacccgatttaaaaatggcgagttctctgaaatcatttttttcatggttcacaagctggccgcttgccacctcaaccatatagtggataaactcacgcagcacatattcctcatgaacatcatcctctgctaaaaggcctgcgttaaaatcaatccaatgcggcttcgcttcatacagctcggtgtttgtcgctactttcaccgtcgggacaaagctgccaaacggcgtgcctctccccgttgtaaagaggacaatttggcagccggccgccgccaatgcggaggaggcgatcaaatcattgcctggcgcgctcaaaagcgtcagccctcttgtcttgagcacttccccgtatttcaagacatccgtgacaggagaaatccccgctttttgcgtacagcccagcgatttatcctcaagtgtagaaatgccgcccgctttgttgcccggtgagggattttcgtacaccggctgatcatgtttaataaagtattgtttgaaatcattgattaaatcgactatcttatgaaacacttcttcattggcagcccgctgcatcaggatggtttctgcgccgaacatttccggtacttccgtcagcaccgtgctccctccctgtgcaatgagataatctgaaaaacgtccaagcagcgggtttgcggttatgccggaaaaaccgtccgaacctccgcatttcagcccgatcttcagttcagacagcggaatgtcttctctcttatctcctttggccgcttcatgaatttccttcagcaaagcaacacctgcctccatttcgtcggtcaccgactgggattccagaaacttcacccgctccaggttcacatcttgcagtgcttccttcattcttgccagctcattgttttcacagccaagccctaacaccaagacgccgccggcatttggatggcgaatggcattcagcaggatttgcttcgtattttcgtgatcatcgccaagctgcgagcatccgtattgatgctttaacaccagtacgttatcaaatggagcgatatcccctgtttctctgacaaaacgctgcagcattttttctgctattccattgacacagccgacagttgggacaatccacaattcattccgtacacccgcatctccgttttctcttctaaaacctttaaacgtccggttctcattagaatacggattttcatcaaatctcggtgtatagctgtatgattggatatcagacaggtttgttttcgtattatggacatgaatatgctctccgatcgagatatcttgtgatgcatgaccgattggaaacccgtacttgatgatgctgtcgttttctttgatagactgcaatgcaatcttatggcctctttttatatcattctttacttcaatcgacacgccgtccgcatgcagcctctctcccttttggatatcccgcagagcaagaaggatattatcttgcttatgaatctttataaacgacttcaacgtacctctccctcttgtatgcagtattgttcaagagcccgctgcatgcccagctcatgaataagattcaagtaaacagcgactctatcagtcagcttcggtatctcattgagatctgccccccacagccgctgttcgcctaacactcttgatgcaatccgaagcatgtcgtcatcctcctgacaccaaacctctttgaaaaattgaagcactgccggatcatcctgcaatgtctcattattatgataaaaatacagaagagcgctgaaagaaaacaccaagcgttcaggaagctgtcccttttgttcagcatattccttaagagtcggcaggtttctcgttttgaatttggaaacggagctcaatgcaatgctttccaggtaatgcttaatatacgggtttttaaaacggttcagcacatcgtcagcatactgagaaagaccttccatttttaaaacaggaagaatttcgtcgtcaatcagctctcttataaatcgcccaacttccggatgctcgacagcatccctaacagtttttaagccgtataataaagccactggcgtcattgctgtatgagcgccatttaaaatccttacttttttagtccggtatggggtgaggtcgctgacgatctttgtatggagccctgcagccgcaaagggaagttcttttccaatccaatcaggcccctcgataacccataaataatattgctctcccacaactatcaaatcatcctgatagccaagatccgccgtgatctcatcaatgctgtcgacgggaaaacccggaacaatccggtctactaaactattacaaaatgtattggcctcatgaatccactgtgtaaatccttcctccagcttccacagacctgcataatgaagaaccgtttccttcagcttttcgccgttgttctcaatcagttcacatgggattaggacacacccttttgtctgatctcctttaaaagcctgaaagcggaagtagagaaatgcagttaatttcccagggaatgttttttgcggcctatcctctaaacgatctttttcatcacatacaatcccagcctcagtggtgttggagataataaaccgaagcctttcgcttgatgccaattctttgtatgcttcataatcagaaaacaggtcaattccccggctgattgagttgataatcatatgctcgtttacggcttctccgtctttcattccttgtaaaaaaagcgtatataatccatcttgctgatttaatcgtttgattttttctgagcctcttggctggacaactgccacgctcccattaaaattagcgtgttgattcaattgatcaatctgccaatcaacaaatccccgaagaaagtttccttctccgaattggagaattttttctggataccgagtatagtgatcgtacacatttttattcagtttctgcatcttattgcctccctctttttatgcacacgttaacatttttctttataaaagaatgcccgctgaaaaacggggcatcacgtcgtcaatcgtctgactgaatcacgcaccatgaattttgtgttttccaagattttttctgcttttgtttcgggctcgctgatcagagacaagagtttttgcgcaccgagcacgctgattttctccactgggcgctttactgttgtaagtcttggcgtgatgtactgtgaaaacccaatatcatcaaacccgatcaccgaaatatcatcaggaacgcgcaggccctttgcgaatatcgcattcatcgctccgattgccatgtcatcattcgaacaaaaaacagcggttggaggattcggcagtgccagcagcctctccatcgcttgaaagccgctttccatatcgtactgtcctttgacactgtattcatgcttgatcggaatatgatgttgaatcagtgcagataagtagccttcctttcgctgctgggaggatttaaagccttcgatcccctcgatgatggcgatgtcttgatggccggactgaatgaagtattctacagcttcttgagagccttccttgtcattggacaaaatattcgtgatggtgcgatcatcaatatcacgattcagcacgacaagcggaatgtttttttcgcgaatatggtaaatgaaagaattatcaatgtcactttggctcattaaaatgatgccgtcatatctcatcggtgtaacggagtcatagtttttcagatcatcaatgccgcgcacatacagattgtaatcctcacttatggcttgattgacgcctttgattgtgtctgcaaagaagctgtgtgaagttccgtttgtaatgcttgtaaagaacagcccgatcgtatgcgacttttgcatcgccagacttttcgcatttacatttggtgtatagttgagctgctctgctagctctagtatctttttcttcgtatgttctttgatgtaaggactgttgttgagtgctctggaaacggttgtgtgggatacgtttgcgagttttgcgatatcttttatggttaccatctaattcccttccttatcataccggctgcgattatttactgtatattgtatcatcaaacataccgcctctcccactatatttccagattaataagacacaggattctcagcttctgttcccgctggcttgccaatgattggacggacaaaacgaatcacagcaagtgaagcgaagacagccagccctccggcaagcaaaaatgctccagaaaacgtgcctgtttggtcaacaataaatccggttagagccgggccgataattcctgccgtgttggcgaggaaatgcatgaagccgccaacagaaccgacattgttttgatcaaccacatcttgaatgacagcccaatagatagcaccggtcaaataaagaaagaacactgacagagcgacaagagtgacagcccctgcagtcgttgccacaagcccggcaaaaccaatcaggacagctgatgaaaacaaacacgtgacaagcacaaccttgcgcgagaacagcacaccttttcgggccgtttttttgtacacatagtcagaaacaaatccccccgcagccagcccgataaagcctaaaatccacgggatgaccgtaatgacactcatcgattcaacacttaatccccgctcgtcgacaagatagctcggaaaccatgtcaaaaagaagaagaggatgtagttgtaagcgaaaaaagcgaacgccgtgaacaggaccgttttttgcttcaggtaaaaggtgagcggaattttttctccgggagacgtttctgcttttattgccggtgcttccttcatcgtctcttgcggcttttctttgacaaacttgaaccagagcactgcccatatcaatccaataatcataatgagaacgaaggataccttccagctaaacgccactgcgatcatgccgactatcgggccggaaatggctcccccgagcggcgtgccgctgttggttacaccgataacagacgcccgctgggtcggcgggaaccagttgttcaccatcttgttgatggtcgccgaaagcgggccttctcccattccgaagagaatgcgtataatcagcagactgacaaagccaaaagcaagggcgactgctccgctaaacagcgaccaaacaaccatcgcgacaaacaaggtcagctttgccccatagcggtcggatgccacgcccccaagaaagttaaaaatcgcataaccaatcgaaaaactgctgaaaatcaagcccaattgcgttgcagacaatgtgagatcatcctgaataaaaggagctgcaatggaaagcgccgagcgatccaggtaattaatcacccctgccaggaacaaaaaaaggataacgggaagcttatcttttgaaaacatctcaacctcacccctatgttggttcagtttctgttgcatcgctttcgttacacacctgaataagccataaatcctccatcgacaggaacggtgatcccagtgacaaaaccggaataggattcatccgccagccaaagaagcgtaccgagcaaatcctcgggttttccgaagcgcttcatcggtgttcccgcaataattttgtgagatcggctggtgaacgttccgtcttggttgatcagcagatcatgattttgttttgtcagaaagaagcctggggcaatcgcattgacccgcagcccggtttcggcaaaatgaacagccatccacatcgtaaaattattgatcgatgctttggcggcactgtatgccggaaccttcgtcataggtgaataagcactcatcgaagaaagattgataatcgccggtgaatcggctttcagcagctcttttccaaacacttgcgaggccagaaacgcaccggtgaaattggtggagaatacagttagaaagcccctctcatccatattaaaaaaggattggccttctcccgcttcttcatatgtctccacatcggttatcgcggcaggatgattgccgccagccccgttaattaacagatcaacagcgccaaattggccaaggatgtcttcctttgcccgctccagtgacatcctgtccagcacatccgcagcaacagcgcacgctgtgccgccagccgccgttatctccttcacgaccgcttggcctttttcagccgtccgattcaatatcgccaccttcatgccatgacgggctagctcccgtgccatcgcagagcaaagcacgccgctgccgccagtgatgacagccgttttaccagccaggttctcatgcagcgggatcatacgtccacctctttttttgccattgcttcataggcgtcccacagcccgttcaaatacatgatgccaagtgcccgatcgtataagccatatcccgggcggcattgctcgccccaaagatggcgcccatgatccggtctgacatatccttcgtaatcctgcttatgcagttcttccatcacgccttgaatgttgatcgaaccatcctttgttaaatgagatgtttcaataaaatcgccattctcataaattttcacattgcgaatatgtgaaaatggagcgatgccggcatacgttttagcgatctccaccatgtcgttagcgggattggctcccattgaacctgtacaaagggtgatacaattagacggtgaatctgatatggcccgcagtttcttatagcttgcctctcctgtgataatgcgcggcagtccgaaaatcggccacggcgggtcatccggatgaatggccatttgaacaccataggcctcagcaacaggaagaatttcctgcaaaaagaatgataaattgtcccatagcttttcttcatcgaccgttctgtaggcagcaaaaagctctttgatccgcaccaatttttcgggctcccaccccggcagtgtcatgtcagatgcttcctccaccgtccgaatcagctcttgaggatcaaggcttaccaccttggccttttcaaaaaacagagcggtcgatccatcttctagcggccggaacatgtccgtgcgtgtccagtcaaaaaccggcataaaattatagcagatcactttcacaccaaatccggcaaggttgcggatcgtttgtttgtagttttcaatataccggccgcgttcttcgttcccaagtttaatcgcttcgtgaacattcacgctttctacaacttcagcatgaaaaccataggattgaatatattcggtctcggctctgatttcttctttttcccacacgtcgccgacaggcttttgatggagagcccaaacgatgcctttgactccgggaatttgcttcacgtgttcaagtgtgactgtatcgttgcctcgtccataccatcggaatgtcatattcatgctcgcacctccggattcagtcatttaatcaaacgtgatgacggctttccgcacctgatctggatgctccttaataaactgaaatgcatgatgaacgtcatcaactgaaaatgtatgggtcaccagcccgttatgcactaaccggcctctattcaaaagctctaccacttttggaaactgattggtctgcaatcgggatccggttatcgtgacttctttttttgtaatcggcagctgagaaatctgagccgctctttcatcaaatccaagcacaaccacatgtcccgccggtgacacggcctcaattgaaagcgcaaatgtctccggcaggcaaacagcatcaatgaccacgtttgctccttcattcccagtccattcaaggacacgctcggcaacatgttctgcttggacatttacaacagcatcggcgccgttttctttcgcaaatgccagccgctcgttgttcaagtcagtcatcatgacagcagcgcccgccagctttgccattttcaacacacagatcccgatgggccccgctccctggatcaggacggtatcacctttttccacctggcctctccacactgcctgggcgcctatcgtataaggctcggccatgactgcttcctcccaaggcaagtcctttgagaccgagtgaagctgcctttccggaagcacaatatattcccgcatgcctccgtcctcatgtacgccaaatacagaaagcttggcgcaaacattcggccgccctttgcggcaggcatagcacgatccgcaataagaaatcggctcaatcaccacatgatcaccgggttttaagctctgtacattcgcaccaactgcctccacttgtcccgttacctcgtgtccgataactctcgggagggtagcaagcggattcgttccatgataaatgtgcatgtctgaaccgcaaatgccgactcgcttgactttcacgagcacttcatcatcctttgaaagaactggcttcttcacctccgctgtcaccagatcatacgcttttcgcacttgaaccgctttcattttactcacctgctttttaagaattcatacacgctccgagcgatagaaattccgtttttcttatttctttcttcatgcagctgctcgatctcgccgggcacatacactctttcgaatccaacagccggcggtgattgctgcagttcatcaatcatggcatccatctgctctaaaaacgtatcccagtcagtaaaaaaggctggattgatcgcgcaaacgtaatgccccagctttcttttttgatcaaggccgctgtacattttggcaatatgagggccaaaagccgcgcccgccagcaatcctgaaaatacatccaccacaatcgatagtccatagcctttcgggcccccgaatgttgaaagtgagacgaccttgtcaggatcagttactgcttctccgttttcatcgactccccatccttcaggaatttctttgccctcttcacgggcctgcagaatcttcccaaaagccactttggatgtcgccatatctaggataaacggttttttatgcttagccggaacaccgtaagcaatcggatttgtccctaaaaaaggagtcctccccccaaacgggacaacgatactgtctgtatgcgtcattgctattccgatcagcttttcgtcagccgctttttgcacaaaatagcttagcgctccgcaatggctgctgtttacggccgtgaccatgccgactccttttttcttcgccatgtcaattgcatggtccatcgccatgtcgcaattcacatgaccgaaaccatcgtctccgtcaagcaccccggtcacaggccccgtttctttaaaaacaggctgtgccccaggattgatccctcccgctaaaagcctgttcacatagtgttctgtgcgcagcacgccatgcgaatgtacattgcgcaaatcagcgtgcacgagaacatctgctactttttcagcatctcgttcattcaaaccggcaccggccagcttttgccgaacgagttcctttgcttcttcagctgcaattgttatcgttttcaagcaagtgcctccttccttttcagttttttgggcactctcctagcgaaccccctacaaacacattttatttataaattattttaaatattctctatattatattgtcagatcttttgctgaagatcctgaacgatctgagcatgctgctggtctgtgagtttataaagaaagccgataatgatcatcgctaatgccaaagcaatggccggatacagaagcagaagcgctttgatgccaatcagcgcctgtgctgtctggactgcattcgggacatagccgataatccccaaaccgatccccgagagaaagccagacaaagattgagcaagctttcttgagaaattgaaaagtgaatatgtcgttgcttccttccgttcaccggatttccattcgccatagtcgataatatcggagacaagagcccacgtgatgccatttgggatactgattccgataaaggcgatactggcgagaattgtaaacacatatacgttagatgggagcataaagttgatcagatccgcggccacactgatgccgaagccgatcattgccgttcgtttctttccaaacatcttgacgagctttggaaggaatacgacgcccaaaaaggaagaaccaataatgatgaagttcatataagccattaattcaacattgcccaagttatattgtgcgaaatagacgagcatggcggatttaatgttgtatgcggaaattgaaaaaatcgtcatcaggacaagggttaacagcggtttatttgtaataaatgttttgacgacagatgagagtgttaatttttcttttggtgcttccgatatgacaatgcgctctttgcagttgcggtagcaaatataaaaccaaaacacaccgagcgcggcgaacaagcccatgaccactgggtagccgaccttcggattatcaaacttgacgagcagcggcatcacggccacacttgtgataaacaaggcgccaagtgatccgatttggcggaacgtcgaaatggaggtccggtcctcagaattttgagtcatcgctgcccctaatgagccgtacggaatattcacaaacgaatagccgatgccccaaatcatataggatgcatatgcataaatcagttttccggtcgttgatacattgggagacagaaaaataagaacagtaagcaccgcaagcacgatgctgccgattaatagataaggcctgaatttcccccgtttgccaatgtttttgcgataatcgattgatgagccgacaattggatctgttatcgctgcaaacagcttactgactaaaaaaatgccgccggccatcgcagcggggattcccgctacatcagtgaaatacttcaataaataaatctggccgagatcaaacataaaaccgttgccaaaatcaccaaaaccataagacattttctctttcaatgaaagccttttttccgtttcgaccgacacaaccttatttgccagttcagttcgcatgttccacctctgtgtcttaagaattttcggatagtgatccgctcagcgatgctgagcggacactttgttacacgtttgctttctcttcttgaaattggaagtagtgtttcgcattgtcatagcaaatcccctgaacgatgcttcccagaagctccatatcgcgcggcacttcgccgttttccacccattctccaatcaaattgcagacgatccgcctgaaatattcgtgacgcgtatacgaaagaaagcttctggaatcggtgagcatgccgataaaacggctgaaaaggccaacatttgataacgctttcatttgatcgagcatcccgtctttagtatcgttaaaccaccaggctgtgccgaattgtatttttcctggggtaataccgtcctgaaaactgttgatcatgctggcgatgacatagttatcatttggattcagtgaatataaaatcgttttcggcagttggttcttcatctcaactgagttcagcagcttgtataaaggcttagcaatttcttcatcgttcattgaatcatagcctgtatcaggtccgagccttttcatcatttttgtattcgtgtttcttaaagcgttgatatgaaactgcatcgcccaatcgagctccgcatacaaaccgcaaagaaactgaagcgtatgtgtcttaaatttcttctcatcttcataagaaacctctgttccttgtaatctgtcagaaaaaatccgtccagcttcttcttttgttgtttcggcaaataccattgaatctatcgcgtgatcagaaactctgccgccggctaagtggaagaatcgcactcgtttttccaacgcctttaaaaactcatcataggttgtaatcgatatggcggcggcatcttcaagcgcctgcacccactcaggaaagccttcacgattgatctcaagtcctttatccggccgaaatccaggcagcacgctgacaggaaagtctttgtcttctcttaataatagatggtattcaagagaatcaacagggtcatctgtggtgcacacgacctttacatttgatttcacgattaaatcccttgccccgaagccttcccctttgagcagttcatttgtccgtttccatatagccggcccagacttctcgtttaaaatctcataaatgccaaaaaaacgctgcaattctaagtgagtccagttatagagcggattgccgatcgccatcggcacggttttcgcccaagccataaatttctcctcatcaggcgcatctccggtgatgtatgtctcctcaattccattggctctcatgatgcgccatttataatggtcaccatacagccaggcttccgtgatgttttgaaatgtcttattttcatagatttctttcggacttaagtggcagtggtaatcaataattggcatgtctttcgcaaaattatgatagaggctgacagcggtttcatttttcaataaaaagttttcgcccatgaagggttccatgtcctcaccgtctttcattctatttcaaaatgttaacgttaacattttgatttgtttttattttacctttatattcctctgggatcaatctcttttttgaaaatgaaatgttaacgctgtcataaacataaaaaagacattgccagaaagcactcggtaaggaacgcttttggcaatgtcagattcattaaaaggattagtaagccaggctgaaaagtcctttaatgtgagttaagtagcgtacgttacttgcttctttcatcaaggaagcaggaagacctttaagcggtgtagaattagcaccaatgatggcaaccgcgtctttgcgtccaaggcttgcaagtgtaccagagtttactggcttgaatgtttcaagcgttttgccttccaggtaagcgaataggttgtaaccgatcagctcacccatttgccatgcgatttgtgcagttggcgggtatggacggccgtctggaccgaagtaaactgcgctgtctccagcaacgaatacatcttcatgagatgtagattgcaggaagtcatttacagtcgcgcgtccgcggttcacttctagacctgattcaccgactaatgggttaccttgtacgccgccagtccaaacaaatgtgttggcaacaactttagatccgtctttcagatcgattacgtttccttctacatttgtaacaggaagacctgttaagaactcaacgccgcgtttttcaaggcttgcagtcgcacgctcgataagatcatccggaagaacaggaaggatcttcggacctgcttcaacaagtttcaatttgatttctttatggtctacgccgtattttttcgcaaggttcggcatgatgtcagcaagctcaccaacaagctcaacacctgttaagccgccgccgccgataaggattgttgcatctgcttcgtttttcgttttagagtactcgcgcacacgatcttcaacatgctggaagactttgttcgcatcagcagcagatttcaataccatgctgttttcttcaagacctgggatgccgaagtaagccgttacagaaccaagacctacaacaagcgcatcgtaagttaatgtagaaccgtcagcaagcgcaacttcttttttatcaacagagaaagagcttacttccgcaattttaagatcaatgtctttgcctttgaaaagtttttctaatggcattgcaaccgctttttcagacacgttgcctgcagcaaggcggtgtaattccgtaatgatttggtgagtagggtatttgtttaccactgtcacgcgtgcttgttcttttgtgtaatgtttgcgaactgttagagcagaaagaactccgccataaccagcgcctagaatgacaatatgttttgacatcgtatatcctccgtcctttatatcaatttgaatctgagattatttttggttttcgcgttcgttcatgacttcaaggtagctgttagcaaaacggaacagcttttgagcttgaggatctttcagcatacgcaataggccgaaaagaccaattgtttcgttgcttgcttccgcgcggtcttttgcttcgatcgcagtcgcagctacttctttcgctgtttcttttacaggctcaagaatttcagtgatcgcaccgactgtgtcgctttttaacacttcgtcagtcgctacagactgagcgaaatcataagacttcgttaaaatattcactaactcagtcagcttcggaagctggtcaactaaaacagtcaatgattcttgaacttctggctttaatagctgatcaataagatcttgctggctttggctgacagacgcatttgtttgatcgattgtttctggcatatccaattctcctttactataagcagtttgctgatttttttggaaagggtagtgcctctccctgtctcacgcttttaaggcataagaataaggattgtgaattcgtgcacaatcatttacaaaaataaatgtttactacccagtttttcatcttgccatattcagtattatttttatctaaaaataaacaattgaataagtcaaaatcctttactctctctgaaaatagcaaacacaaaaaactccaattcgattaccttctatatgataacactttttgaacaaaatttgaacgtgaattgcttcgattatgaaattaatttatatggagctcatgtcatatcgtttctgcggcactagttattgacaatccagcaatttctccccttcactttacccatatttccaatagaggctctctttttcctgtgatcggatcattcgccggcaacgccgcctgcttaatctgtttgagcgcttcctcccgctcattcggtttccccgtcttcatatcatactgaacgccaccgggataggcgccaaggacagtaaaatcgggacttgagctgagctttttatgtccgactccggctggaatcacgactgcgtcgcctaatttgaaagagatggcagcccctttttctcccccaaactgaatcacagcctctcccctaagggcaatcaggacttcatgcgtattgctgtgataatgatggtatggaaaaacactccctgaccagctgtttgaccagccatgccggatgacgatccgctctgccagtccggtgtccttaagcgcgttttgatacaccacgagcggaaaatcagggtgattcggaatcctgccgtcatccggaaagaagtatgtctgtgtctctttttccatcaatttcacctcccttttttgtcttccacacatagcggttcgcaaaacatgatgtttttctcatgattccattgatctgcatgataccgaatagtatagtataaaaaaataatgccagaatgagggatatcatgaaagctatcgttatcggaatattggcttcactctttttcgccgttacctttatattaaacagagcgatggagttatcaggaggcagctggctttggagctcttcgctgcgctttatttttatggtgccgtttttatgtttgattgtcatcatgagagggacattcacgcctctcttactagagatgaggaaaaagccgttttattggatcaaatggagcttcgtcggcttcgtgcttttttacgcgccgattacatttgcggctgcatacggtccggggtggctcatagccggaacctggcaaattacaattgtagccggggtgctcttatctcctttgttttatgtcaaacaagatatgccgggcggtccgcagttcgttcgccaaaagattcccctggtttcacttggcacttccatgatcatcctgattggagcggctctgattcagcttcagcatgcagaatcgctttctgggaggatgctgcttttcagtgtgctgccggttgtcattgcggcttttgcctatccgttaggaaacaggagaatgctcgaagaatacggaggccggcttgatacatttcagcgcgtgcttggaatgacattggcaagccttccattctggcttatattagcagcttacggctggtggtcagacggccttccaacagcaagccaaaccgttcaatcctttatcgtagccgtcagctcaggcatcattgcgacggttttatttttctgggccactgatatggtaagagacaatccgcaaaaactcgcagccgttgaagccactcaatccggtgaagtgattttcgcgttgcttggtgaaattgttctgctgtcaggcgttttcccatctcttttatcatttgccggtttgttcattataatagcggggatgatgttacataccttcgcttcacagccgagaaaaccgaaaaagaaagcacagtcaaatctgactgcttagcatctgcaggagaatgggtgaaagcctgttctcctttatttgtgctaccaaaaggaatctgtttcacgttatagttaaatataatgtcagcctacttatattgaaaggtgattattgtaatggaagcaaacgatcaaacacaaaacataccagccatctccttcagatcagtcagaaaaagctataaacaagatggacaaacctatgatgtgctgcaggatgtcaccggagacattcaacagggcgcaatcgtagccgttttaggtccttccggctcaggcaaaagcaccctcctttctatgtgtaatttaatgagaacgcctgacagcggcgaagtcaacatatacggaaaggaagtcagagaatggaatgtcaatgagctgaggcgaacggcagccctcgcgtttcaatcggctcccgtgctcgacgggacagtgcgtgacaatttaagtcttgtacaaaggctgcatcaatcccagctggactctcctgaaaagctggcttctctcgcagggctgccgccagagctgttagacagaagcgccagagacttatcgggcgggcagcggcaaagactgtcactggccagaacgctctcaaatccttcctccattctattgttggacgaaatcacatcggccttggacccggtttctgctcttgagattgaagaactgatcaaacgtcagcatcaagagaaaaaatggacagtcatgtgggtcactcataatatggagcaggcaaaacgaatagccgataccatttggtttatggcagatggccggctgcttgaaatcgctgaaaccgaaacatttttctccgctccgcagcatgaagcagcgaaagaatttttgaagggagggacccggtaatggattacctttctctctctttaacgatgatctttgtattgatcgccttgtttttatcaaaatcctttaaagccggtgtagaaaaagacatgatcatcgccaccatccgggccgcggtgcagctgcttatcatcggttatgttttgtcgctgatttttcgcggagaccaccctgtttttatcctgctgatggtgctgttaatgctcgcggtggcggcacaaaatgtcatcaagcgaaagaaaaatactatcggttcgttttggagggtgtttgccgcgttagcaatcgtagaaattgtgacgcagggaattctgctgtctcttcatatcattccgcttacggcacgatatgtcattccgatcagcgggatggtcatcggaaattcgatggtgctctcaagtttgtttctaaaccggcttaactcagaagtcggcgttcgcaaagaagaaattcaattaatattgtcacttggcggcacaccgaagcaatccatacagcgcattcttacctcagcgatgaaaatgagtatgatcccgacgctcgaaagccagaaaacactgggtcttgtccagcttcccggcatgatgactggccagattctagccggcgctgacccgattcaggcagtacgctttcaactcttaatcgtgtttacaacgatggcctcagccgcgctgacttgtgtaatcttaagcgtgctgacatacccatcattattcaccgttcatcagcagctgaagcagaatgaatgacagacaaaagccgctttccgagggaaaacggctttttgtacttgttattccttttcttcataatacttggccagctcaacaatcattgcacccatccgctcaatctctggcgtaagcagtctcgtaatgccctcttcccgcagtgcttcagcagtcacttttccgacagcagctgcgatggcgcgttcttcgaataccttcttcacttcattgatataacctcgccccttagcaaaatcaaacagggaacgaacctgaatggccgttgtaaaacaaacggcatcgacctcaccgttcatcagctctcggcataaccgctccaccgtttcctcctccggcgggatgtgctgataaggcagaatcggcaggacagacgcgcctttttcttcaagaaatgccatgagagccggcgctttttcgccatgaagctgcaccatgactgtttttcctgaaaagtcgtgaggctccaaagaacggattaagcctcttgttgtcccgtcttcatccgaagcttccggtgtgattccaagctttttcagcgcagacagcgttttgtatccccggcatgccgctttcgctaggcgaatggcctgcagaaactcatctttcagtccaattttctctaccatatcgacaagagtctccaacccgatgcctgtcgtgaaaatgacccagtcagctttttcttccgcaaacgtccgcaaatccggctccacctgcttctctgctaagtaaactgtaccttggagaggccggatgacagggattccgccctgtttttcaatgattgtactgatttcttccgtttttcgtgagccaccgattgccacacgttttccaagtaacccttttcccatacccgtttcctctcctctttgaataggctttttatgtatacaagcttaataaagctattgtggcgcaaaccaagggagaaatcaagataaacccaacctcctaaaatccattgaatacgccggaagcttgctgtaagataaacagcagacacgtcttgtaacggaggatcgacatggatacaaaaaaagaagaatatgaaacaaaaggctacgatacatcgattgtttacgaattcaatgaatatccggatgcccgcagcgggcgctgcgacaactgtgattacacactgttcaaaagctctgtaaaaggcggaaaatttcttagagaatgccggagatgcgggatgaaaaaaaatatttaaacagaaaaccgaaatcaaattgatttcggtttttatgtttttactgcgggacagcggattttttcataaacgcttcaatctcagctgccgcacgctccgctccgccagcttcttttacatccttttgcatattcttgacgcggctgagcagctcttgatcactggatacagcctgaaccgcttcctgcaggctggaaacagtcacttcctctttcggcaaataaacgccaaggcctaattcatcaacccgatttgcagtgagctcttgctcatacatttgtggaatgacgacaagcggcacacctgcgttcatcgcttccatcgtactgttcatcccgccatgagagatgaacaaatcagctttctctaacacctcaagctgcggcacactttggcgaatggtaaagttagcaggaatatcctccaagctttctggatcaatcgttttcccaaccgacatgatcacttgccatgaagaatcccgaaatgccttgatgcacatcttgtaaaattccggccatgcgttaaacgccgtacccaaagaaatcagcataagcgggcgatcatccttgtcaatcaacaggctttctttttccttccgttctccgagagaggggccgacaaaacagaaacggtcatcgaacgtctcatgctgaatctgaaaagacttcggcataaagacaatatttaatgcttccggcacagctaattgttcaaatgaaacagccggcaacttctcttgctccaagtaggctttaaattcagcctctgcttctcttatttttttcagcatgtcttcatttcctaactgaaaggattcattttgggcatatgacgaacagagcttaatgaccggaacattaagcttttcagcaaacaatttaccagccagcgcaacaaagtcatagatgatcagatcaggctgatcatccttatataactcctcaagctgcggcagaatgctgagtgattctttcaaaaggctgaggggcgcgtcattcttttccatcatctccctgatttgcttaggatcaatattcaaggatgtatgatagagcaatgcttctccaccggcttgctgaacagcgggcgcaaactcctcagtcgtcgcgtacgtgacacggtgccctttctcacaaagcttctctactaaagcaagcgtaggattgacatgtccgtacgccgggatattgatcatcgaaatatggtactttttcatgaatctccagtctccttatctattacattttcacacggaagctctttaatccgtatatcacactgttttcaatcggagtgatactgacgcactccatatgaggaaaagcagaaatcaaagacgttaacgcgatatttgcttcaagacgggcaagcggggccccaaggcaaaaatggatgccgtggccaaacgcaatatgcggattgggatggcggcggatatcaaacatgtgcggcctgtcaaacttcgcttcatcacgatttgccgatgccacaaacgccaaaaccatatcaccttctttaatcaggtgccccccgatctcggtatcccgcttggcaatgcgcctcaaaaccggggccggcgctctgaaacgcaaggcttcctccactgcctgaggcatcagttcaggatggctgcgcagttcctcgtaaacgcctggcgtttctaatatgctgtacatcgcatttgaaatcaggtttgtagtggtttcatttccggccaccagcagcagcgtgcaaaacggaatcagctcttcaccggacagcttctcgcctgtttcttccgcttccactaaaatagaaataatatcctgttccggtttgtttcgcttttcttctatgatgccggcaaaaaacgcggccagttcttcctcacacttatctcgttcttccaaaaaggctttttcagcttcttcacttttatccttcggtgtactgaccagaagatcagaccatgctttaaactgttccatatgcgctgaaggcactcccagcagctcagatatcacaataaccggaagcgggtatgaaaaatcgtgaacaaggtcaaactcactgcgcccctgacatttttgaatcagttcatctgtgatttcttgaattctcggttcccattgcttcatcacgcgcggagtaaaggctttgttcacgactgaacggatttttgtatgcttcggcgggtccatgttaatgatggaatttccaatagagcttgtctgctgcggcatgcaactggaaaacaactctttatccccaacaacttttttgacatcatcataaagaaaaacgctccacacttggttttcttcatcaaaggaaacaggcgcatcctttctcatcgattcataccatggaaacggatgatacgcatcctgtttgtttttcccattgagcagcgctcgctgcaaggcttgccggcggtttaacacattcatgtacggtcactccccttgaaagaattcagcaattaatgttccacttcacctcccgctttcgaaaaagagagggactaccacaaataattaaattgataacagcaggcaggcgatcacgatgttcgatgcaggcatcatatattccccctcgaatttcgttcatcttaccataatctttcaatttttttctattctgcactgctgttttggctcacaacgtgaccttaggcataagcacgcaaatccaatatggattcaattgcaccgctccgctcaaaaaacgtctctgttttcaaccaaatgcactaactccaaaaatgactttcccattatgtaaaataatttggttctatgattaaatagaaggtaaaaggtgaaggagagaacaacgtggcagcacagactgattacaaaaaacaagttgtcggaatcctactttcacttgcattcgtactctttgtgttctctttttctgagagacatgaaaaaccgcttgttgagggaaaaaaacaggaaaactggcatactgtcgtcgacaaagcctccgtcaaaatttatggcagccgattagttgaagaaaacaaattaaagcaaaaactcggccataaacaagccgattctattttgacccttctgaaactcgccaacgaaaaacacattacattataaaaaagaaagagcccacaggctctttcttttttagtcaaatatcgttttcttgtccggatggcgcaaaaagtcaaacagcatgctaagctgtgagggtgtgtttcgtttaggagaaagcggcgggagtctgtcttccggaaaaaaagcggcatgattcgtctcgatccctgtttccccctgcccgtccgtcatgctgcatgcgatgaagattttataatagtgataaggctgagggggatgagagtgtttatggctgtctagcacggccagcaatcgagacggctctgtatcgtaccccgactcttctttgatttccttgacaacgttttcagccggcgataaaccaatctcgcaaaatccgcccggcagcgaccacagctcatcatgcttctcccggacaagcaaaatctgattctctctgaatacagcgccgcgaacatccgctttcggtgttggatagcccttctcgccttgccataaatcagtgataacttcaatgtccttctccgagtaatccgccatcatttccgcgctaagcttcattagctcttcgtacctctccctgtcgtacacatccttggaaaaagcaagccccgcttgggcgatcgcccgaatccgctgtgcccgttccagccatttggtttgcacttttatcactcatcctttcaagtcaagtttcgctataaaaaatgcacgttttccacagatgaaaaacgtgcaactgtaaattagcatctaatctaacttcaccaagtaatcaatatcgtcctttactctctcttctgtattactgctatttgtatcagctaaaaacggattatataccagtgtgtaatgtttctgttctcctttagggatgacataactgagtacacctgtaacctttttccccgatactagtgttcctcccataaggattctgcccttctcttctatagaaaaaacaggccgcactgattgatcattcttatctcttaaatcaaacccgataaaattgtagcttattgaatcttcccctatattttccatcgtaacttctataataagccgttcctcatcatcttttattgtttttgtctcctcatttacagctccgccaacattcatatattcacctttttgcactctatcaactttattcactgtaaaattcgtatgtcctgctttaaatgtttctcctattttatgtatttgatcatcttttttggtcttcggctcaccgccttttttcaattccttatcaagttccttttcaagctcttcttgcgattttttctctttcggtttttccttctctgacgcatcgctcgattggctgcacgcagaaagcgctaacccgatcgtcaagacaaataatagtaataagacttttttcatgattgttcccccatctaaagtaatcgatttctattataatcagatttttccttttcttaacaggtaagaaagtaacgattatttctatctcattcatcacaatcttacttcttcctagtatttgaatattttttactagtccattagaccttttcatcaaaaaacccgagctggctgaagccgctcgggtgggaggtcaatctcgcttattcattcctcttttctctcggggttcctgatgatgtttttggtgttccggaggctgcgtcgtgcgttccagctcctttgtatcttgtcccattccttttaaaaaggaaaagagcagtgtaattgatttgttgatttccgggtcttttagcgagcggataatatcaaaataacctgtcttttcttcactgtttttctgctctacagcgcttgccacacccgcattcactttcaaaatgagaggctccagctgcttcacgtccagcatgccgagtgttccaaacagaagaagcagatttttcagcgtattggctgtttcctctgtatctgcctttttcaccaggatatcaagaactttatccccttgaccaaaaaggccgcggagcaacggcaggaccccgcgctcgttcatatggcccagcatatgcaatgtttcgagaatcgcttctttgtggtcaattagagcatcttcaatttcccgcaaatcacgctttcgctgatcctcttctgttacctcgattttttggattcgtttaatcgctttagccattatggcccatcccccttttcacagcgtcaccagggaaaatataatccttccgcgcccatttcttatgaacctgcacaccgatttgcggctgcggattgccgttgcggtggttgatcttaggcagcgggctgattccgtcgtgcttcaaaatttccatcttggccgatgtttctttgtaagcaggcgtatcggtatccttatcggcatggctgcctgttaacaggttgatcgccgcttcccctgaatcgttcattggcagatatacttccttccctttgactcgatcagtaatcaggcacttcactttgacatttccgaaaggcgatgtgagtctgacgagggttccgtcctgaatccctcgttctgccgcaagctcaggagaaatttctaagaacacttccggtgttttctccgaaatcccttttgatttgtaagtcaggttcccttcgtggaagtgctccaagagccgcccattgttgacatggatatcatattcctcaccgaattccttaggctctgtccactggacagggtagagaatggccttgccgtctgggaaagggaagcgctctgtaaagagtaaaggcgaatcctttccatcagcgtttacaggccattgcagggaattatagccctcaagacgttcataggtgacaccggcataaatcggcgacagcttggctgcttcctccataatgtctgcaggatgctcatagagccagccggcgccaagcttattggcaacctccataataatctgccaatccggctttgattcacccagcggttcaaatacctgatacaaacgctgaatccggcgttctgtgtttgtaaacgttccttctttttcaaggctcgggctcgcaggaagaaccacatcagcaaactccgctgtacgtgaaaggaaaatgtcctgcaccacaaagaaatcaagcttttcatatgcagcgtgtacatgattgatattggagtcgacaaggcccatttcttcaccttttacatacatcgctttcaactgtccggaatggattttttcaatcatttcgtggttggtcatacccggctccttcggcagcggcacaccccacacacgctcgtatttttggcggacttgttcgtccgtcactttttcatagcccggtagtctgtcaggcatactcccaaagtcacttgctccctgcacgttgttatggccgcgcaatgggtaagaacctgctcccggttttccgtagtttcctgtcacaagcagcagattagagatcgccgtgctcgtgtcgcttcctccaatatgctgtgtcacgcccatcgcccacaatgcgcacacactgtcagcttgcccgatcatctctgccatttggataagggtttcttgatcaatcccggttttctcctcagcatattcaagtgtgtacggcgcgaggctttttacatattcatcccgtccgttcactctttctctcaaaaatcgttcatcggccttgccgttttctattaaatatttggcgatcgcattcagccagacgatatccgatccggcacgcggctggacaaataaatctgagcgctctgccatttcgtgctttctgatatccgcgacgatcactttctgccctctcagcttatgagcccgtttaatccgagtggataagactggatgcgactcagacgtgttcgaaccgataatcaaaacaaggtccgcttgcgcgatatctgtaattgatcctgaatcaccgccatagccgactgtccggaacaggccggcagtcgcaggagattggcaatagcgagagcagttgtccacattatttgtgccaatgacccctctggccagcttttgcataagataggattcttcatttgtacatttagaagatgtaataaaagcgagagaatccgggccaaacgcctcttttaattcagtgaacttgctggcgatcagcaataacgcctcctcccactctgcttcacggaaatgatcgccttcacggatcagcggctttgtcaggcgttcttcgctgttaacgaaatcccagccgaacttgcctttcacacaagtagaaatgccgttggcaggcgcttcctcctgcggctctactttcagaatgtctctgccctttgtccagacatcaaagctgcagccgacgccgcaatacgtgcagacggttttcgtttttttgattcgttcatcacgcatggccgattccatatcagaaatcgcgagaatcgagccgtagcctgtctctacgcctttcgtgatctcgatcatcggtcgcagcgtttcgttattgatgcctgttaaatatccggcttccccttccattcctttttccatcatcgcgttgcacggacagaccgttgaacaatggccgcatgacacacatgacgactcattgattggcacgtcgttatcccaaatgacgcgcgggcgtttccgctcccagtcaatggtcagcgtttcagttacctgaacgtcctggcatgcctcaacacagcgtccgcacaaaatacattgatctggatcataacgataaaacggatgggattcatccgtatggtatggcttgtgatcaaacggaatgctttggtgattgattttcatttccttcaccgtattatgtatttcgcatcccccattgttgtaatcgcaaactgtacaataaagctcatgattatataaaatcttgtccatcccgatgacctgcgcttttttcacgtcaggtgagagcgtatcaatgatatccccatcctttaattcagcggagcacgacctcttcagctcaccattgatgctgacgatgcacgtatcacatgtctcaatcggccctaagcttggatgatagcaaacttgcggcacttcaatcgagctgttattcaaaagctgcagcaccgtctgttcctcggacgcttccatttcaacgccgtttattgtgatttttttcttgccaggcatctccattcccctttcttgctttatataccgaattacctatttcagttcccttacaacaactcaataaaacatacaaagcgcactcacatgtttcgttgcaaaaacacggggaaacggaatggtagatcaattaggagggattaacatgaaaaagacaatgtctgctattaccgcggcggcagcagtaacaagctgttttaccggctttggggctgcgtccttttcagcaccggcaaaggccgcagctcaaacaaacacgctctcagaaaacacgaatcaatcagccgccgagcttgtcaaaaacctctataacaccgcctataaaggggaaatgcctcagcaggcgcaaggccttaccattaacaaaagcacaaaaggggatgtccacgctgcgtttggggaaccggaaagaccagtcgggggagacaatcgctttgatttatatcactggaatatgggacagccgggctacggattttcctatcataaagacatgacaatttcagaaatccgctactttggaaccggtgtggaacggcagctgaatttaggcggagttacgccggaagtactgcagaagcaattaggaccagcaaatcgggtgttaaccgtcccgtttaccgatgaaatcgattatgtatatgatacaggccactatgaactccattttgtaataggcacggatcagacagccgaccatgtaaacctaaaagcaaaataaacaccctatgcggctattcagccgcttttttagtggacaaataaaagatatattccttacaatacagggagatgaaaaagagacggggtatcaattcgcaatgattcgaaatcgttggatatatgcagttttcaccgtactgatcattgggctggggcttggatccagagcattctccagtgttcttcctgataccctcaatacttatctgggagactcgttgtgggccgctatgatctttacgggatgcggatttctatttcggaagctgaagacaatgataacgggcattatcagtctttctttctgttttgtcattgaattcagccagctctatcatgccgaatggatcgaccagattagggatacttctcttggcgggcttgtactggggtacggttttttatggagcgatatcgaagcatatacaatcggaattgccgcctgtgccgccatagaactgctggttttgggaatcaaaaagcgccgctgtatgtgacgctttttttcatttggaaaacaatccgcactgagaaagaatggtcttcgcatccaaacgtgtggcctcgcttatcgtgatatgatgttgattcataaatgactgaacggcatgatagccaactgcataacccgcaaaagccgataaacctgcaggcttaaagccttggtcgttagcaattggatcaccaaacatataacggctgacttccgaaactcctttcacatccaacacctcattaatcacatcaatggaatattgcaaatcctcatgatcaaaacgagttacccaagggcccaatcgttccgtaccaaacagctctctggcgaatgattccgccaatccttcaatcacaagataatccccgacacttacagagccatgatgaaaatctatatacgaaaaccgcacattatgatgaaactcatgagcaataatggaaggaatccttggcaggttataatggttcggattaatccatacatgaataaagcccggtatcccgccaaacccgcagtagcctttttgcagctgaagcttatttggatcagcgatataaaggccgaatttgatctcctttgcattcacccgcagctgttcgcgctcatcaaaaaatatgcattgccgaagtgcagattccgcagtctctgaaacatgtgattctttcagtattcgcagtgctttctgtccgatttcaacatcacggacatccaaatagccaagcattttcgcagccatgatcacatcatagccgtttggctccttcgctttcagcggaacatggatggcggtccacatcttttcaaacggcctcatcatcgtataccgaaattcatcttctcttttctgttcttccattgaaaacagcttttcgtattgctcaaaggtcttttccatgacaagattcatcctgattccctccttgtcaaaaacatacgatatgccgcagcgtaggggtcaacagcgaaaattaagccatttttcactgtaaaatgatacaaagccgccgataggtaaggcataggaggtggaacgatggatattcctgctttatcggttgcaatgcatcaagcatcccttgcccagaatgttaatatcgctttaacgaaaaaaatgctggacaccgcccagcaaaatgccgatcaaaccttaaagatgattcagcatccgactctcggacaaaccattgatgtaaaagcttaacctcacaccaaaggcggccaataactccatcctcccggccgcctttattgttcacaaaaaagcatgcatgttttgattgttcctccgtatgatttattgtttgccatattaaggaggtcataaaggatatgaaaagactgtttacgaaggcttcattggtgttattcgcagtagtatttgtttttgccgtcaaaggtgtacccgccaatgcggaaacccatgcctacgatggaaaaagcccttattacaatgattgtgcgtccagcggctctacaaaaaaatcctcaaacttagtgaatgcaagcaatcaagtcatcggagtagtcgagcttaaattcagcagtacatgtaaaacggcttgggcaaaaatcacgatgaataatacattgacgtctggctttgaagcaaatgcggagattacccggaacacggacggcaagagatataattgtgattctgcaggcggcaatggaaaagcggtggccggccaaaagtcttgctatacaccgatggtatatgatttagatccaaggacttcttacgcttttggcaagtattcaggaccaaacttaaatgtttgggccaccacaggctcttattaaatagaaaaaaggctgtccgtacggacagccttttgtaatttatttcgcttctctttgttttttaacctcttcaagctgagaaaccgtcaccaattgatatccttgatcggtgagctttttcataatttcatcggccgcatcagcagaggtgcggtaaatatcgtgaattaaaatggttcttccatctctcgcctgactcatgacacggtcaacaattgtttttttgttacggtctttccaatcttccgggtcaacatcccataacgcaacatccattttcatttgactccgcagttcatcattaatgccgccgtatgggggtcttacaagcgtcggacggtatccgcttattttttcaatgatgtcttgcgtatcattgatctgctttaacgcttctttcactgaaagccttgtgagaagcggatggctccatgaatggttccccacctcatttccttctttcagcattcttattagcgtttccggataatattgaactctgctccccaaaacaaaaaacgtggcatgacccttatatttcttcaaggagtctagaatctgatttgttgtcgcaggattcgggccgtcgtcgaaagtaagcgcaatgactttttgatttggatcaaccgtttcctctttgggtaaagaaatcacttcatgcttcggcttttgttctttgattttatttttattttttgctttatcaatatattgttctttcagaatgtctttcaaaagacttttcttaatggcaatcgattgctctccaagatagcctgctgcaacctgatatgtgtcaaagtaaagttcgatataatcctccttgatggcaaagcggctgaaattttcttttttcggagccgtcccttcctttaacagtgcatcgtccgcggcaatgtccttattctttttcagctcgtgataagcgattaacgaaagcttatgtaagtagtcagcgtcctctttgaaaatatcatcaatggaaagaaacgcttgtttactaaaatcatagttaaacgtttttttcacggtttgcccgtgtgccccgccgatgtatttatattcattaaatacaatcgccactgtctgtttggcataatggacaattttataatcaacatttaattcgttgcgttttgtcgtatgctcttggtcaacgtcctttgtttccttttgaaattgacgaacctctttttctgcgaatctttttaatgccgaatccattttttcatttttgaaaacgggatagttaaccgcgtaattaaaagttttcccgtcattcacaagcgttgcgatctcaacattcccatattgagaatcagttcttactttattcatgaccgtttcttttttcaatgaatgattatggaaaaagccgataaggcccaccacacatacaactgctattaatacatgaaaccatttgattctttttgccaacaacaaaaactccttctttcgtagccatttcgatttactcttcatcagttgaaactgtatctatttagaaatgtttttgtaacattgtagtaacatttatttcacatttgtaatactatgagatttagaagttcatgtcaatcctttttaaggaatttcatcataaaaaaaaccgaatttcatgaatgtacatacacccaacttaagcatcaggaatatggtaaaaggaataaaaaaagctagggaggttttcctcttggattaccctttgaatgaacagtcatttgaacaaattaccccttatgatgaaagacagccttattattatccgcgtccgagaccgccattttatccgccttattattatccaagaccgtattatccgttctacccgttttatccgcgcccaccttattactacccgcgcccgcgaccgccttactacccttggcacggttacggcggcggttatggcggaggatatggcggaggttacggttactagtcgccgcatatcaaaatgggggcagtccagctccccatttttttgttttaaaaatgacaatatcatgacaaatataggaaataattgtgattctgtccccctcttgttacgataacaaaagcatgcagttttgggggaggcgtctatttttggagaatacaagagattctgcagccatatctgaaacaaaatacataaaagcttcgaaccgggtaaccatttacgattttatcaaacttgcaaagccgggcattatcatatcaaactcgatagcagccttcggcgggttttggatcgcgtttgcaagcgcagaaaaaacgttaaccggcttggcttttttgatgacaatggtaacagcaatgttgggaaccgcgtttgtgatggcttccggcactgtctataacaactattttgatcggcatatggacgcaaaaatggcacgcactcgcagcagggcctcggtcacagggaaaatgccgccagccatgatcttaacatatggctctgttttagggatcgcaggccttgccatgctttattccctcaatccattaacggcctatctcggactggccgcctttattttttatgcgatcatctatacggtatgggtgaaacgaacgtctgtgtggagcacatttgtcgggagcttcccaggagctgcgccgccattgatggggtattgtgccgtaaccggtgacttcagtatgacagcagtgctgttgtacacgattatgtttctgtggcagccgccgcatttttgggcgattgggataagacgcaaagaggaatatcgcgctgctggcgttccgctcttgccagtagtcaaaggcaatcatgtaacaaaaataaaaatgatgcaatatattgccgtcctggtgccggtcacgctattatttcctttctctctaggcaccggccatataagcccattttatttcttagccgccttggttctcggaggcatatggatcaaaaaaagcatcaaaggattcaaaacagacgatgacgtgaagtgggcaaaggatatgtttgtctactcgcttatttatttttgcttgctgttcttcatcatgatgatcgattcatttatgatgtttctgatcagatgatgcaaaaagagccacacattaatgtgactcttttttgtttggaaaaacagcatctaatagaaatgtcatggcaaaaaacacagccatgcaaatcaaaaatcgtataatctcactcaaaatccagctatcagctatgcgcataccatcggtttctcggagggttgcgcatattgaaaaaatcatgagtatgttttttagggtttctttgttcataaaataccatcgctttctcgatagaatgacttaaaggcaatgagataagtcatcaagatataaaatatgtcgcatcgttgcatgttttgattgaaagaaatcattgtttttttgccagccaattgtaaagctcaggcaaacagatgaaaaccgtttctgtgaaaaagcagatctaatcgaatgcttctatactctctccacaaataaaaaatgctaagaaatacatttgtttctctaatctataaacccgcactctttttctgatcatcaggtattataagccaaaaacaaacaaaaaaatagacttgcgtttgagttgtatggaagtgaaattgcaagaataacccatacggtggtaatatattgtttgattttcccatattcatagatttggaggtcatacaaaagtgaagggaatatttttagttgttcagcttggattttctattatggtatttctgtttttagctgctgttaattggtatcaaggaagcgagcttgtttcagatcgatttgattggaactatactgctaaactctcaaaactgctaaatggaattgatgccgtcagcagccccaaacaaatttcgcagcttgattttttcatctattccgctaaacattaccctgttatgagtgcgttaatgatcatctccttcttatatgttctggccgctctttttttacttatatactcagtcaaatgcaataagcaagagattcatttggaatgctgagccattaagatcatgttaataatcccttaggttttcggaacttcttgctcaattatgcgtataccttaataggagggatcaaacgatgaaagaatatgaattcgtaagagttgagctgagtacgatgagaagaaggcctaaagaagactaccagcaaatcatccatgattatgcgaaaagaggctggagattcgttcagattttcgctcccagtatagatgggtatggggcagctgcttattttgaaatcatatttgaaagggatgcggaaaaagcttaatccatatgactaagctttttcgttcccctatatctgcatctatacaatttctgcaaatgcggcatcacatgatctggctaaatcttgtgccgccaactttagctgcataccgattttccctgcactgacaataataaaatcaagcgtttctgcagatgcatcaatataggtcgggaacaattttttcatgccaattggcgagcagccgccgcgaagatagccagttaccgctaacagctccttcattgcaatcatttctattttcttttcccctgtcacctttgctgccttttttacatctaactcttctgcaacgggtacaacaaagacataataatgatttgttcctgctgctgcaaccaacgttttatatacatatttcaaaggataaccgattttttccgcaacggagatgccatctaccggctggccgtctgttttataccctaatacctcataagagatgttctgctgttctatcagacgaaccgcatttgtttttgccatttttttcgccattgttttcacccactatcaaaatgatgtatgtctaacttcttgcagtaatatgtaaattctatcatcctaacctgcattttcaaggttactagcattgaatcaacgaaaggacaaattgatttccttggacgcctatagcccattattagtctacatggaacaaaacaggaatgaacaaataactcccacatacaatttgtatgaatggaaaataaaggagtggttgctttgtatcattacttttatggccctgcgttaattccttacttttcacatactcataaccctcaaagaagtccagacttttcagaaagacagcgaagaagagaaatcacattgactgtagatggctttgtccccccatcttccaccgaagatcttggagacggcttttattcttacgcatggacgaaccaacaagtcatcaatccagatgaatacttagtttgtcatcttgaaggaagagatatcaacgtgataaatggtggattcactccgcgcgatactgctccattgtatgctgtagcaagctttccaagacgaagaaaccaatgggtcattatcattcataatcctgtgcaaacccaaagagccatatcgctttatttgattgcgaaaaggtagcacaacatgttatcagaaaccctgcattcaggaacagaaaaacgggtagggacacattaacatcggtattttcccacccgtttttggtctgggcaaactcttacctgtcactctttcaatccccctcaattttttcatctttctctactgccaaggtatcagagaaaattgttatatgttatcattattcccagtaaaaagaaaagaggattagatatatggttctccttgagacgaatcgattacgattaaaaacgattgatattccccttcttgacgccgcgtctaaacaagatcatcaggctatcaaagacttagtttatgaaacaaatggtgaatggccaaattctgatttttttgaagcgataccttatttccgcgagattttagtcaaaaacaatggaacaaaaggatttgattcatggattattgtaaagaaggacagtcatgaaattgttgggggaactggatttttaggtgacccagacgaaaatggcatgattgaaatcggttttgcaacaaataaaagtcatcgccgcaaaggttattgtgtggaagccgcccaaaaactaataaactgggcattaagccaagaaacagtaaaccggatcaccgcaagatgcgaacatgataatctaggctcacaaaaaaccttggagaagttagggtttatattgaatcataaatcagcggattataaacattgtatatatgttacaaagtagagtccttaattacaaaagcaggcactgcgcctgcttttgtttggattatttacctctgtgcttctttttcgctttttgctttttgagcatatacctttgctcttttacatgttctcgttgttctttcattatttgttttttcttttgctttcttgcttcaagctctagctttatcgcctcttgagctttagaagctactccggcgtttttcaactcttttgaaacctggcgctgcaatctttttggattgatctttttttgacgtctgccttgtaaactcactccttcctgctcagcttgggccaacatattcaggagttggttatgaacaaactctaatacttcagaatccctcggctctttgccaaaaagatgacgaaaggctcttagctttccattgtccacaacttcaacaacgcctacccaaaactgaccatcgtagtaaatcgttaatttcataacgattccctcctcataaaagatattaaagaatgatggacatcccgaggaggggaaggttactgacattctcaatcatgcatccggactaccaaccgaatcgtgttttttcattctttaccatatacagaaaagagtgtaacatttcttctccaactattaaactcttattttatttagatcattgctggagaataggcgtcttcactcgcaaatttatttctcaagccctgccatgttacagatgggagacgatacattctgcatatccttcgagtttaaattctccaagaccgtaaggcagcaacatatgatctccttttttgaaaggatagacatactcaccagagatcatacggccctccccttcaatcacactgataagaaggaatggtttttgctgctttaagcttgctgatcctgataagttccatttccccaccgaaaagtaagcgcattcaatcaatgtcgttgtaagcaaatcctcaatttgttcatggtgaactgtatgccgttctggaatagacgggacctctatcacttcaatgctctttttcagatgaagctcgcgcagcttgccttctgcatcttttcggtcataatcatataatctgtaggttgtgtctgagttctgctgcgtctccaaagcaagaattccttttccaatcgcatgaacagtaccgcttggcacatagaaaaaatcccccggctttacctttacacggcgcaagagctcatcccattctccacgctctatcatggtagttagttcttcctttgttgttgcattgtggccataaataatctcggcatctttttggcaatcaataatgtaccagcattctgtttttccaagctcaccgttttcatgtatgttggcatattcatcattcggatgcacctgaacagataagtcctggtcagcatctaatatttttgtaagcagagggaaacggtccccttcaagctgtccgaataaatgtctgtgatgttcccataattcgctgagcgtgaaccccttatacattccgttttgaacaacgctttgaccattttgatgcgcggcaaaagcccagcactcccctgttcgttgtgacggaatggtatagccaaaatcagctaaagcggtcccgccccaaattctttctttgaaaacaggcttgaaaaataacggttcagtcgtcatgaaaatcccccgctttattcgatttcttctagcagcttgtatgcttcttctgttgtttgcacggagagcagccgctccctataattgtcatccattagctttcgagatagcatctgcagtattttgagatgctggtttcccccgctctctttcggtacagcaatcataaagattaatttagcttctgatccatccaggctattccaatcaacgcctgatcgtttgatcccaaaggcaacactcggctccctgaccgcctcagactttccgtgcggaatcgcgatattcatgccaatcgccgttgttccctgttgttcacgattcaaaatggcttgtttaaacccgctctctgaaagcagcgcacctcttcgtgacaatttctgaatcaattcatctatgatgtcatcactcgtttcccccgataaatttggttcaattaattccgggctgataatgtctgtcagttttttaaattccgacatctcagctttttggctttgaattggctgctttatttcatttgctgccgcagcttcacttggcgcggaggtcggtgcagtttcactgagcacaggagacgccgtaatatccttttttagtacattgacgaacagagcagtgacaagagatcctgcaatcacagcaataaaaaacatcaagacatgatcaactgcgccaagcactgcaacgataggtccgccgtgcgccactctgtctcccacattgccaatcatggctatcacagaacctgtcattgagcctgccataatacttggaataacgcgcagagggtcctgcgccgcaaatggaatcgctccttcagtaatgccgaagagccccatcgtaaatgccgctttccccatttctctttgagatgcctcgaattttctttttcctaaaaacgtcgcaatgccaaggccaatcggggggatacaaatggcgacagcaattggtcccataatttcataatttccttctccaatcattgccgatccaaacagaaacgccaccttatttacgggaccgcccatatcaaatgagatcatcgcccctaaaatcaatgccagaaggatcgagctcgaccctttcatccccgccagccaaactgttaaagaggcgaaaatttgagctacaggcgcgccgatcaaaaacacaaacgctaaacctacaatcagtgatgcaaacaccggaataataataatcggcataatcggctggatggcttttggaacttttaattttttgatccaaagtgccgcgtatccggccaaaaacccggcaataatccccccgaggaatccggcgccgcttgcgctgtcataaaaacttccagtcgccgcaatataaccgccgatcatacctggcacaagccccggtttatcagcgatgctataggcgatatagccggctaaaatcggaatcataaatgaaaatgaagcactgccgatctgttcaatcgttttccagaaggaatcatccggaataactaagcctttaggtgttttctcccctccaagcgttaatgcaaccgctatcaataatccgccgacaacaatgaaaggaaccataaatgaaacgccgttcattaaatgacggtaaattggattttgtttcttctcctgatgattaccggattccgattttgtagcggaacgatagaccggtatatccccgttaagagctttttgaatcaattcttccggtttgcggataccgtcctgtacccccacagacagcagttttttgcctataaaccggtctttgtttaccgaacggtctgcagcaataatgattgcgtccgcttcgcgaatttcctcttcggttagcttattttcaacaccaatccctccctgggtctcaactttgatgctaacgcccagtctgtcagcagctttttgcagattttctgctgccatatacgtatgggcgattccattcggacaagatgtaatcgctaacagtttcataggaaacctcctttaaagtgtgaataataagatcttgtctcaactgtataccgaaatcagctcattaaaatcgctttttttaccataggttccggtaataaaggcatttttccctataacaaaaaaagcaaggaataatccctgcttttaataatccaaatgagataaaaatgtcatgacattggtttctttcgtcagcttctggacgaaggccggctgctcgctaagatatgaaagctcgctaaacagctgctttgtcatagtttgatcctcgtgtttgacagccagcataaaaacgagcgaaactttttcatttccccattcaagcggctcctttaatgtggcaatcgcgattgctgattgtttaataaatttagcgtttgcatgaggaatggcaatgcctgccccaatatttgtagccgacattttttccctcatcaccgcatgaaccgcatagtccttatcaacatagcctttctcaaacaaagctgtcgccagctgttcgattaacttgtagcgatgctccgcctcctgctgcaaaaaaaccaaaaaaggagtcgtattgttcagcatctgaaacgttttttgtttttggcggtgtgattcgcccagctgacgtataaacgcacttaatttcttctcttcgccaggctctaaaagcggagacacaacaatatggggaaccgttatattctccagcgcaatggtggatatgacaagatcaatatcctcatgctttttgatataatcctttaaatcggcctttgcaatacaagccattacagcgatttggtgatatttccgttcaatttttgtccgcagcaattgtgacatcccaatccccatgtggcagacgataaccgcctttttatgtgtctcgctgctgccctgcatccgttcgatcgctgcctgaaaatgcaatgtcaaatatgctgcctcttcctcaggaatatgaagatcaaaagtttgattgatgtcttccaaaacatcaatgatgaggtggaacaaataagggtacatctttttgatgtcattgagcataggatttgctacagaaagatcgtagctcagccgttgtagcacagtattgagatgaatgttcaaaccattgatcaaatcctgatccttgtgaaaatccatcattttcagctctgaaacacgattgattaaatgccctacaaccttaggaagcacagcattttcaaggttctcttctgtctgcaatggataacgaaccttaccgcccaatatatgtaatgttaagtacacggcttcttcttcagggaagcgaattgcaaaaaccggttcaagccgctgtaaacaagcaaatgtccattgatattctttcttcttttttactgccgccatttcttttggggacaatgaaatcggctgcttcattttgatgcggcggaccattaacaatgtatgcagcaacaaactttcaaacgtttcgtctgtgaaatagagggaatgctttttttgtagtgatttgatttctttcgtcacaaagtctacttcataatgtaaaaacttacttttaataaattggctggtaaacgctgtattgtgaatcaaatcagatattcttgccaatgcctttcttttatttctttcgttcccttcaacctttaatccaagccgctgcctagaaaccagtgtgagatcaaaacgcttcagccactcttctactgcgtataaatcctttttaatggaagatcgattgacaaaatgccgagcggcaatgtcttttgcggaaacaggcttcggattcattaataagtcataagcaatgtgcagcattctttccttatcgctccgctgcctagaagaaaaatgttcagtatgtaattgttggcttagccaggtcctttcctgttcttctatatgtaaataaacgcccaaccctggttttcgaataagctgtgcatgagaatgctcattgagataatcctcgatcactttcaaatcattccggattgttttttcagaacactgtaccctatctgcgaaatcttgcacaactaaatagtcatcaggttcagataacaacagatacaaaatctctttttgtcttgtatttatgtattccatctgtttttctatccttcctgtcagtatctacttgagcaaattgatagtataagtatactatataagaaaccgtttacattataaaacaaaatcatagagacaaaagtttcgttttttaccgaagcttccggaaaaaagcgatttttatactctttgagtttgctatgtaatgtatattcagcagaaattcataaaaatactccaattcttcacctatttagaacgaagattttctaatgtatgagtacgaaagtaagaacatgatgaagaaaagtgatttggtatcttcggggataaagtgcaggtaacaaaatttccacacgctcaacaaactaatacccatcaaatgtgtgctattaacattttaaggatggccattctctctcagcaattttccatcataaatacaaactctgtgcagggcacacaatattcttagctcaaatcaattgatcgttcacatattattaacatttatttacaaggaaaataattacttttattgaattgttatagtgcaagacaaaaaactttaaaggagtgtttcaaaatgaatttcaaaaaaacggttgtttctgctttatcgatttctgcgttagctctgtcggtcagcggggtagcttcagctcatgaaataaactccacacctactgaagtaaagaacatttctatttcacctacacatgttatcaagattcaagactataatttacctctaaaagttggagaaacctattctgttaaaaataattcagctactcgttattggactgataaccaaaaagttgctgaagtcgatcaaaatggtttagtgacggctaaatcaaaagggaaagccacgattactttgtttaaaggtactgcagtattcggaaaagtatatgtaacggtttattaatctttatccgccagattttctggatgcaaaacatgcatgaataaaataaggtccccctctaaaaagagaagggaccttattttcgcttcaagtttagatttagttttgggaatacatcatacattggtgtataccgtgtttcattagcttagccccgaataaatccaccttctgaatgaataatttgtccagttatccattcagcctcatcacttgcaagaaaggcaatcattcgtgctgcatcatctggtgtgccaatacgccccattggaaatttaggtgaaagaaaatttcttatttcatctgtcatccatgtagaatctgttggacctgggtttacggcgttaacagtgatgcccaatggtgcaagttcttgtgataacgacctagtaaatgcagaaatagctcctttagttgctgcatacgctaactccccaggcaaaggacctaaatcctgccctgatgtcatattgatgattcttcctgatattaaattagattttttaaaccgacgggcgaattcaacacaaagaagaaaattcgatctcatattaaccgcataatgctcatcaagtgatttagcatctaacgatacataattatcacttgcggaatgagctgcattattaataaggatggaaggatatcctaatttatctgaaattttttcatgtattgtgaatgcagcatgtgcatctgataaatcaattttcattgcctcacagcggacacccatacgtaaaatttcttgttgaaattcttctatccaggccgtatcagaattccagtgagtaaagaagatatgtataccctgtgaggctaacttacgacaaatagccgtaccaatatccccttgactgcttgctcctgtaattagtgcaattttttcttgagaatgactcattattttaacctccaatttataaggagtatctccattatgatggtaacaagctatccaaagaatataatccattaaatcaaacagagctgactttgaatacattttaaaatcagcttaaaaaaacattttcgtctcaaaaaatattaaatagaaaaaataagagttggacaacaatttactacttagtcacaagtggctgatactaagtcattgaatgtctctttttaaagagcctttcaatcattcacattgcttttcattaaccattctacttccgttaattcttgtttttgaacgtctattgtgtgtttttttgtgaaatggattttcacagcttcttcgttttcccaaatctcccaaagcattattttacgttctgatggctcaagcggataagcatggaatgtaatacaaccctcttctttgttcgtttcttcctcaagttttttgaattccttcattatctcattaaggtctttatcactgatgatttttaaacatgccgttatgtaatgcatcgaaattccccctcccatcattttatggcttttcattataacattttcttgaaaaataaatataactgcgacattgattgctcgagttaatcaatcgctgtatgtaaaggatttaaaaattgaaatcaaataaaaaaccttcattttataggaaggtttagaagttatattatcaagtttgaaggcaatctgaagcaatgtgaaatgtgttaggtgtttgtttcactgtaaagtctgtagcgaaaccacgtactaaaactaatgacaagcccatcttcaatttcgctgacctcagatatgagggaccttttctttttcagctctttgatcatttcttccttatcagaaacgaacatgatcttttgcgcccgaagaatggccgcatattgaatctgtatctgatcccatatcatatcagctggcgaacgctcctgaatctcttccatgatttcaagcgtctcttctggcaagaatttagagaaaaagccgtgagtcacagcattttgattcttctgtggtgcgccgccattgttccctaatgcatttttgttgcccggttgcccgcctttttttgtgtgcacacttttttcaatgggtgcaccctttttcctttcccaaccatgccgctgcttccacgatttaatggtgttcactgacaccccgtatttctcggcaaggtccttgtatttcatgcctttgacgtaatccttatacgcctgaatgtgcttttcggccatctacattcaccgccgcccccttctgattcgtgttgttttggaaaagatattccctctaaaccaccaccgtgctcaagccgttaaccgccaattgtctatcctgagacttaccggaagcagtttacagggaacaaaaaaagcaccccgcaggatgctcttattatttaatccaatctttaatctctttaatggtcttataggccttagaccatgttccattctctttcaagtagttttcacctttctctgtcagttcaggtcctaatttgtataaatgaggtctatcatctgaataatggaccccaatgatatacccttcgcgttttaaaaagttcacagcatcatcaaattgatcttcagtaactccaatatcgttttctgacaaaggggtattaccttcaaaaatttcttttaagattgcataccttaatttatccttattcatattttctcctttcagtctttagatctgtctttcacttttctctctttgacttgttcaaatattttcataatagaaattgcttgatttctatgttttctttctactgcaattatccaaacaatagcagcaattgtaccagcagcaaaagataaagctccccaatgtttttcataaaaattaaagaacatggtgagatatgctgcaaataaagggataaaggctggaacatattttgaatgatcatggataatatctatatgagaaaatctcgatatagcaaattctaaacattcaatatccaacttataaagaagagattggaaccttttgtattcttccttatcatgaccaattcgagttttttcaagaaagaaagcaagtagctcctttttgtgataagtataaatcgcattttccagttcttctaagtcctcattattcttctcttcaatatttcgcttttcaatatttcgcttttcaatattcttctttttattatttttctgttttttcattttacaattcactcccatttttaatatcgggaatgaaaagttatcgattaacaatttgcaaaatttgtcgaacgaatctgttgaaaaaaacatattttgtcggggatattaacatgtacgcaatactgctgctgttttatcaccgattcactatgtaagacctcccagttgagttgatcctcgcttaccactgggaggttttactcattgtatgaaattggtggtgacgcaggaataatccgccgcgccgatcctgccccccattttacaccgccgatttaaacgaattcaaatattgcagaaagttggcttctttgactttattgacgatgttgccgattatggctgttttgatctttctgatggtatcccgggagcaatcaaggtggtttgcaatagcagtgtagctcatgccttccatcatgcaatcgtaaacgattcggtgcttttcttcttcaatgtgttccattgcattgtccaggtaatgcacaatagattcatatttgtgaagccgcctttctcttcggtccatctgccgcaattctgcctgactgacgcctgctgatccccttggcatgcccgcttcctccccgtatgttgcagtgagctttgtgctaataaaatccactttgtttaatacacggttgagccttttgatctcccgcagcatgaatttataatcacgaatccattcctcaatctcccatgcaatcatttgatctgtcatagtgctttccctcctgatagttaaatagagtaagtgtcattccagttgtttgctttttgttctgcgatatattgagggcctcgatacctctttcacgttgatactgaaggttttgaccaagaaggctttcaactcgttatagagctcttctttgccgcaaaagatattcacaagctttccgtttttataagcgaatccgtttttcatcatcctcaaactccctttttactttctgcgtttataagcgccgcctttgccacgtctgagtgtttgcatgttagtgttcatcatttgttgccagaaacgatctaagcgctcatgttgcttctgtgatggtttctttttggactgtttcatgtctaattactcctttcatagctagtaatcgcgatagacatctggttagttgcgaaaaaaaacggacaccgatcgaagcacaaatttctctgtaaaacgatcagtgtccgcaggctttccgtcttggacttattcaattttaaaatttatttttacggccctgtgccacaacttacttcgtattcaccatctgatgattttttcgaatagcataagtgaggagtttgccctgtttcatctttccaatctagccaatttacataataaagattcccagattcattgtctccttctcttttctggagaactgcaaagtagctttggtagggatatcctcttttataaatttcgtgtctgattgctcctttttccgaagaagctgtaaagacaacaggagatagaactggaagtactatcaatataacaataagtgctgccaagagagaaagtataattttagttttctttttcattttttcctccgatacctttttatgtatttatttttatgttatattattacatgtattttatgccatatttcaattggtgtaaatgataaatattacttatatttagattttattggaggtttcgtatgaaaaaagaattacttgcttcactagttttatgtctatcattgtcaccattagtgtcaacaaatgaagtttttgcagccactactaataaagagactaaagaaaatgtttcaattaccaacgagattggttacgaaaaagttaaggatatgttagaacaacaaaaatatgattttgaacacaacactcctttagcgcatcctaaagagtctaaattgactgattccgacgaaggagtcttactgtattctgcgttaagtaaagtggacaaacaaaaattccacgagtttacatacgatatagacgatgttaagacttctgaaaaaaacaataagctaattgttgaagcttatattactcgaaactttgtttttggtgttgaaaaagtaacaacatctctgggcgataatattaaacttgaaattcccaaaacaacttctaataaacaaagttctcaatcaacaaatacttctaatctaagtttctctcaagttaaaaattcttctaatcaactaaatgtaataccattgagtaattcttctaagcaactaaatgtaacacaattaaataattcttcttcaactctacaatatgaaaatgatgaagaatattcttcggatgttaaattagatgaatttttaaaaaattataagcaagaagtgaaaaatgatgataaagaagaagtgaaaagtgaagataaaccagtaagtatgaacttcaatgctgctaactctaatcaactaactgtgactgcaacatctgttaaaggatatagtggttacgctgcaatgaaatatgcagaaaaatatgccttaaaaccaaataaaaactataaatattataaagacaaagattgtactaactttgtttcccaagcattaagagctggaagaatgccgtactttaaagaatggaaaccctatacagatgcttgggttaatgcaggagcctttagatcatacattttaaaagctggcggaataaaaatgaagactgtttctgatacatattcaaatgtaaagcttggagatgtatatcactatgattaccataataaaataggtcttcgctatgctgatggttggatggatcatacggctatcgtaacgagccgagcaaatatgaaactttatgtaagttatcattctaccaatagacttaatgttcctcgagaatatgttacttctaaggaaggcggaaaacggtatgtttctagtattcgcaattaataaattgatactaaatcgttgatcatgccttccgctacttaataagctgttgggaaagcaatcccctgatctagagtggttcaggggatttttgtaatttaaacgtgttccaacgctcagaaattccgttcatttgttttccctcttctctcaatacatcaatatctttaaagtaaaccgcagccgtaaatgaaatgattgccccgatcaaagcaaggttcgctttcatgtccggcctgtaatcgtgttggaaatatatccagaatcaacatcccatcagcagaaacaatattctaagtgccatccaatccccctaactcaacttactaacaaaaaaacaccttggatgtttttgtattccatttaataataaagttgtattttaaaaaaagaagtgcttaaaatgaaattgaaaaagctttaactggttttgcattatcccttgctttactcgttactgttgctcctgcttttgctacaagccttgcaaaccatagcacaaatcacgaatcagtatcaccccaagcaatttatcaagattattataaaggggctgattctagagcagaatttaaaaatacaattgatgttttcagtacaaaatttcatttaaaagatgcatggctgaagtgacggtcttggactggctattctcaatgaagatttaacagaaatccgatcttccgtttgttactattgaactaatcaagtaagtttggaggtagtttttggactgcggtcaatgaatttcgccaacagttcgccaacaactcacgaatttgacgaaccggctttattaacgcaaagtaaaaaacccttgctgcgcaagggtttaagctatgattccgactgggctcgaaccagcgacctctaccctgtcaaggtagcgctctcccagctgagctacggaatcatgatatgtatgtgttgctgggtatgttgttgtctttctgacaagttctattatataaccttcccttctattcgtcaactgcttttttagaaaaacttttcttggacttgctgttccgttccccggctattataatatgtcttaattttctaacaatagaggtgatggggttttgcattctttgatttcttccgatgatgtttgggtattatgggggtttattgcggtgtgggcggcagtgagcatcgggctggagcagcgctttaagtgggcgtccgctgtgtcgggcgctattatcgcccttgcaggtgctatggtgtttacaaatgtaggagtgcttcctgttgagtcgcctgtgtatgatactgtgtgggcttatgtggtgccgcttgcgattccccttttgctgtttcagatcaatgttcggcaaatttttaaggaaagcaggcgtttgctgtttatttttctgattagctccgctggcactgtgcttgggagcattcttgctttttttctacttaaacagcatattccttacttagataaaatcggcgggatgatcagcgcctcttatatcggcggcggggtcaactttgcggcgatggcggcaaaatttgagacgcctggtgaatatgtgtcggctaccgttgtggctgataattttatgatggcgcttttgttttttattttaatcagcattcctgcactcaaatggtttcagcggcattatgccatgccgtttgaagagaaggtaaaagccgatggaaacagcggaaacagtgctgaaagctattggaaacggaaggatatttccttaaaggatatcgcatttaatgccggtgccgctttcgcacttgttgcggttagtatgaaggtttccggttattttaaaagcattttttctcatcccctgctgaccggtacgcttggcgatcagtacctggtgcttacgtctttaactgttcttatcatttttcttttcccgcgtttttttgaaaggctcaatggatctcaggaacttggaacctttttgatttatttgttttttgtggtgatcggcattcctgcagatctccgcttaatcgtcacgaatgcgcctcttattctattattcgtgtttatcattgcgatcagcaatttagcagtttccttagctgccggaaaattgttccgcgtgcggcttgaagaaattctgctcgccgtcaacgctactgtcgggggaccgacgactgcggctgcgatggcaattgccaagggatggcgggagcttgtcgccccgatcatgcttgtcggtacgctcggctacttaatcggcaactatgttggcacttttatgggaaattggttttcttccttcttataaaaaggatatttgcatttccctgagaataatgtaagaggaatgctgacatgagaacggagagatcactgtatgttaaaaggaaaaaccatttatgttagacctttagaagtaacggatgccgaagaaaatctgcggctgcaaagtgaaaatcgagatttcttcgaacagttttctatgatacgcgcagacgattattatacgattgaggggcaaagaaaacgaataaccgagtatcagcaaagacttgagaaagatgaagaatatcattttggcatctttacagcgtcagacgatagattaatcgggacggtttcgctctttcaaatcatccgcggagcgctgcaaactgcgttcattgggtattttttagacaaagcccataatggaaagggcattatgacagaggcagtcagattggttgttggttatgcgttccacgaattgaaactgcatcggattgaagccggtgtgatgccccgtaatctcgggtccatgcgtgtattagaaaaagcaggatttcacaaagaagccatcgcccgaaaaaatgtaaaaattaatggcgtttgggaggatcatcaagtcctcgcgattctgaatcctgatgatgaacaataataaaagaagccggaccatccccggcttcttttttaacgaaccgcaactggagcaatttctttcagcgcttgttcgaaatcgtgttctaaatcgtctgcatgttcgacgcccacactcagacggagcaggccatcagtgataccgcgtttttcacgctcttccttaggcattgccgcgtgagacatcgttgccggataggacaaaatcgattccacggcgccaaggctgacagcgaagaccggcagtgacacattctcgactaacttcttaacggcctctttgctttcaagctcaaaagatagcacggcgcccgctcccttcgactgacttttatgggtttcagcgccgggatgatcagccagtcccggataatacacgcgcttcaccgccggatgcttctggaaaaattccgcaagccgctgggctgtttgactcgctttctctaaacggacctgcaatgtttttaatccgcgcaggacaagccagcaatcctgtacgccaaggacggcgccgaacgcgttttgcagcttatacagctgcttcccaagctcttcatctttgacagcagccaaacctgagagcacatcgctgtgtccgcttaagaattttgtcgcgctgtgaagtacaatatccacgccgaggtcaagcggtcgctgcagtgccggtgtcatgaatgtattgtccagaaaggtcagacagccgttttcttttgcaagctgaacaaccgctttaatatccgtaatcccaagtgtcggatttgacggtgtctccatataaatgacctttgtgttcggcttgatgctccgcgccacttcattacgatccgtcatgtcgacaaacgtatgctcaatgccaaaccgggtcagcacctctgtcaccatacggaaggttccgccgtatacatcttctgtcacaagaacgtgatcaccctgtgacagcagtaaaaatgctgttgagatggcagccatgcctgaactgaaagcaaatcctcttgttccgccttccaatgcggcaattgtttcttcgagagctgttcttgtcggcgtgccagagcggctgtaatcatatgccccgaactcttcaaatgaagattggtgaaaagtcgaggcgtgctgaatcggtacactgaccgccccggttccgccgtctgttttaaatggattgtgcacgagctgggtttccagcgtccaattgtgtttactcaaatgaaacagctccctctttgacctgacataatgcctgttttagatcctcttttaaatcttccgcatgttcaataccgacagaaaagcgcagcaaccgattgcacaccccgtttgcgatgcggatctcttcaggaatatccatgtgcgtctgggtcgcagggtatgtaataaagctttccaccccgccgaggctttctgcaaaacaaatggtcttcagtgcttttaaaaacggattgacccattcttctttttgcagacggaaggacagcatgccgccttttccgggatacagcacatccgaaatttcttcctgctcttctaaaaaagccgcaagctcctgcgcgtttgcctgatgctgacgcattctgaggctcagcgtcttcattcctctcatcagaagccacgaatcaaatggcggcaggacggcgccgatcgcattttgatgctgaaacatttcctctccgagctgctcatccttcaccacgacaagtccagcaagcagatcgttatgcccgcctaaatacttggttgcgctgtgaatgacaatgtcagctcccagctctagcggcctctgcaagaccggtgtataaaatgtattatctacgatcagcagaagaccgtgctcctttgtcatccgggcaatatgttcaatgtccgcctcctgcatgagggggtttgtcggcgtttccacaaacaccgcttttgtattcggcgtaatcttagagcgtaaacagtcctcatcgctgaaatcatcataatgaaaagtcaatccgtattttttccattcattttcaaataaacggtacgtgccgccatatagatccgatgaaacgatcagttcatctccgcttttaaacagcgccataatcgtttggatagcagccattcccgaactaaaagcaagccctctcgcgccgttttctaagttagcgatggcgtcctcaacaagctggcgtgtcggattttttgtgcggacataatcaaatccggtagattctccgatccctctgtggcggtatgctgttgataaatagataggagcactcactgttcccgtgacttcatcgctacggttcccaatttgagctaatttcgtttcaacgtgctgtgacatatagctgacaccttcccttttcaaaataaaaaccccttcttcataagaagaaggggtttaacgcttcttcttatcttccaagcataaaaaacgcttgctggatttagcaccttggcgctttgcacatgcaaaacaagccggttgctgaggtttctaagggccagtccctccacctctcacgataagaaatatcgatttcaattttctgattgttttatattagcgcaattcacagtttatttcaacacttttttcttcgtgtgccgaaccgtttaaagagagaaatttctaataattcatggtacaataattgaaaatgcaagaaagtatagtgatgtcctggaggaatgtttttatggcaccgaaaaacggcacagtgcaagaaaagaaattcttttcaaaagagcttaacgaggaaatgaccttgcttgtttatctgccgtccaactactccccgctttataaataccatgtcattatcgcgcaggacggccacgattatttcaggctggggagaatcggcagacaggttgaggaattgctgtcgaaacgcgaaatagaccggagcattattatcggtgttccttataaggatgtaaaagagcgcagaaacacctatcatccggagggttcaaaattttcggcttataaacggttcatcgcccatgagctcgttccttttgcagatgatgagtatccaacctatcagatcggttacggccgaacgctgatcggtgattcgctcggagcgaccgtgtcacttatgacagcgcttgattatccgaatatgtttggcaacatcatcatgcagtctccctatgttgacaaacacgtactagaagccgtgaaacagtcaggcgatatcaaacacctctctatttatcaccaaatcggaacaaaagaaactgacgtccacacgacagacgggaacattctggactttacagaaccgaaccaggagctgaagcagctgctggagaagaagctttccgattatgatttcgagccatttgacggagaccacaaatggacatactggcagccgctcatcaccccggcgctgaaaaaaatgctttaacactctatcatactttatttccaggagggacataatatgaaatacggaatcgttttatttccatcaaaaaagctccaagaccttgcaaactcttacagaaagcgctatgacccaagctactctctgatcccgcctcatttgacgctgagagcatcctttgaatgcgcggaggagaaagcggatcagctcgtatcacatttaagaaacatcgcaaaagagtcccacccactcgttctcaaaatgacaaaatacagctcatttgcgcctgtcaataatgtcatttacatcaaagcagaaccgacggaagagttaaaaacactcaatgaaaagctatacaccggtgtgttggcaggagaacaggaatataatttcgttccgcatgtgacggtcggccaaaacctttccgacgatgagcattcagatgtgctgggacaattaaaaatgcaggaagtgtcgcatgaagaaatcgttgaccgtttccacttgctttaccagttggaaaacggatcgtggacagtatatgaaaccttcttgctaggcagaggagaataatgtttgaaagcagttatcgcaaaaaatgaagaacaactgaaagatgcattctatgtaagagaagaagtctttgtcaaagaacaaaacgtgcctgctgaagaagaaattgacgaacttgaaaatgagtcagagcatatcgtcgtgtatgacggtgaaaagcctgtcggtgccggaagatggcgcatgaaggacggctacggcaagttagagcggatttgcgtactgaaaagccaccgctcagccggtgtcggcggcatcattatgaaagcgctcgaaaaagccgcggcagacggaggcgcttccggtttcattttaaacgcgcaaacacaggctgtgccgttttacaagaaacacgggtatcgcgtgctttctgaaaaagaattcctcgatgccggcattccgcacttacaaatgttgaaggactgaacgcatccggatcttttgagatccggatttttactgcatataaaaaaaccgttctctcgtatgaacggttttttatacatatcgattaatatatgtgcccattcctttttctcgcaacctcttataaagagagcgcttacgtttcatctcgtttacttttctttcagctgccgtttgattctcctgctgcttttccagttctttgtatacccgctgaaacgggacatagctgattttttcggttccggcataatcctgcttatgtccaatcgttctattagcatattgagcgtattgctggttctgaatttgacctgcatatatcatacaatacccacccctctgctgtctcttttcccttaaacttactttttgaaacacatttcttttgatatgatagtcattgtctgtaatgaacaccttttgattgggaggacccctttttgaaatgcgcccgactgaatgatagaatcatacatttacatacatattcgagagaacattatcaattcctctttgaagagggaataaaaggacatttattttgttctcattgcggaaagcccgttttgttacggcttaacatcgccgatccgccagagtttatccatcgccagccaggcgattttccggcatgtgaggaggcgtgcgaaccgaagccctctaaagaggggaaaaaagaagatgatcaggaatctggtgtcattcgtttacccaagggaaaagcgatcgccgctgacccgtccccagctgttacggaatggcaccgtcctagaagcattaaaccaggaacaccatttgtgccaaaaacaatagaacccgatacgagcctttttccgtctgtcggtttaaacacggatcagctgaaagctgtcacggaaacagaaggtccgctgcttgtgcttgcaggtgcggggagcggaaaaacacgggtgctgacagcccgtgccgcccacatgatcgaacacttaggcataccgcctgaaaatatgctgcttgtcacctttacaacaaaagcagtcgctgaaatgaaagagcgtatggcgaaccagtacggattacagccggcaaaagtcagaagacttgtgacaggaacattccacagtctgttttataagatcttgtatcactctaattctgctaaatggaacggtgagcatctgctgaaaatggagtggcagcgggaacaatatatcaaaaaagcactctatgaagaaggcatcgatgagaaagaattcccagttgaccaagctctgcagcagatcggtttttggaaaaacacttatgtcccaaatgaacgcatccctctaaaagatgagtgggaaaaacaagtttatcgtttatatgaacattatgaacgccagaaaaaagaacacagccaatttgattttgatgacatggcttcagcctgctatgaattgtttatcgagcggcctgaccttctggaacaatatcaatctcggtttacgtatatcttaattgatgagtttcaggacattaatccggttcaatacaaaatcatgcaaatgctcgccagcccggagcaaaacctgtgctgtgtcggagacgatgaccagtccatctacgcgtttcgcggaagcaatccgtctttcattcttgattttcaaaaggattatccgggagcgaagacgatctatttaactgcgaactacaggtctacgcacccgatcgtctctagtgctgatatcgttgtgaaaaagaacaaaaacagatatgccaaaacgcttgaagcggcccgcgatgacattcaggtccctgtgctgttttatccttatgatgaagaggaagaagccacaatggtcgtttccgatatcaaagaaaaaattcaaaatggagccagtccagaagactttgcggttctttaccgcacaaacagcggaggccgtgctatatatgaaaggcttcatcaatcgtcaattccgtatacagctgaccgcggcgtccaatcgttttacagcagacggatcgtccgccagattctcgcctacttgtacgccagccaaaatgaggatgataccgaagcgattaaacacttgcttcccgccttgtttttaaaacagtccgctttgaatacgctgaaggcgctctcgatcacagaggactgtaccatgatcaaagcgctggccaaattgcctgatctgaagccattccagctggacaaaatcaagaaaatcgtaccgttttttgcaagcctccgcacgatgaagcccgtagaagccatcacctttgcagaaggaaaaatgggcttctccgagtatttaaaaaagcggggcaatgagggcaacaagctggaaaaaggttccgatgacctgcgcgatatcaaggttgtcgccaagaagttcaaaacgattcctgactttcttgcccacgtagaccatatgagggccgctgagaaaaacagaacggatgaacatggcgttcagctgatgaccattcaccggtcaaaaggccttgaattcaaaacagtctacgtgttaggcactgtagacggttcgattccgcacgatttctcattagaaacggcaagaaaaggagacgaggccgctcttgaggaggaaagacgccttttatatgtagccatgacccgggcgaaacagcatttatatttgtcttgccccgctaacaggcgcggcaaaacagccaaccgctcaagatttttgtatcccctgctacagaaagcaagacagcccttgcatcattaacagcccggcagattactgccgggtttttactgtaaaaaaaggcccgctgcagtgagtcagccaggccatccacttatttattatccatcattttagaaatcgtgccaaaatcaagcttttcttttccgcttgtaatagattccacaattttatcttctaattcttttggcacgcgtctgtttgccagctgcgctacgcggttaatcacactgcggactgtattttcatctttaaaattagcgttttggagtgatccggcaagattcattacatcctgcatcttcacacctgttttcttttcgatgttcttaaaaaattgattatccataatgcgcctccttttggcggagtaatacggtattgtatgaatgcacataatacaatgtgcttttccaacatttttaaaaataaacacaaggcaaggaagcacgggttataacccgtacttcctcaatacatcttaaaagaaagatgcacctacgatgatgaggagaatgaataatacgaccaacaaaacaaatgttgaaccatagccgccgccgtaaccgccagcataaccgccataacagccgccgccgtagccgccgccgtagccgtatccaaagcccatagataagcacctcctttactctctatacactatgtgagctgctgggatcggcttggatattcgcatagggcgtttgcggatttacgattgatcatattgagcttgatgttttttaagtaaggcctctgttttttcagccagctcttcaatctcatcttcaaattccagaccggctttatcaaatgcatccaagtcttttctgatactgcccatcgtgtcttcatgctttttttgcttttgttcgtgtggttcatatcttccttctatccatttttcaaactcattcacttttatccccccgcttatgatatatgctgagcaaggccgccccgttaaaaaaacaaaaaaccggagttctccggtttctttgccaggctattgaggctttttctttttatttccgcacccgcagcctttcttttttatcttttttgattgatacgatgaatctgtatatggagatttttgggaaggtttatgatgctgattcatttttgtccccttcctttccttatgtcatatatgctactttatgcgtattctgacagaaagttgctggtagtaacgccttattcttgcagccattttgatacgagcgtttctatgatgccggcaaggccggcgatcgccaaaagtaaaatcagccactgcgccgcttgcgggatcaacgcctggcataaaatcaaaaagccggcgcaccacacgcctgtgcaccaatagcagctcagcaattcaccaataaacgccctgacaccggttcccttaatcacgatataggtttcaatgttcccgtccgcatccttttcttccttctcttcatgaaacagactgcgaagcggcgccataatcgtgtcaaacaccagcaggcgggcgagccgaaagaccgcaagcgatagaagaacaattgtcagcccatttataaccactcgttcactcctttgccaatcatgatcccttcacatatatgccaaaaccctattcttcatgaattgtatcttgtccggcagaaaattggttatttttattattccgctctgcaccccatttgcattatatagagtatggataagaaaggagtgaaggttatgtctgtccaagaaaatgttgacacactctactcaaaaatgtttaaagaactggctgaagaacatgataattatatagaaattattgattctgaaaagattacgattcataaatcagacaccacatttgcactttcattgcaatcagcagtttcagctttaatcactgttacaacccagcttcttatcagcgatagcgatatagcagacattgttgcgagtgatctgatagcacgctctacagcacatagccgaaagaaagtaaaaatcaaaattataaactgctataatatcacaatcactttatcagctacagacatcatggcatccgttcagctcttaacccaaacattaatcgctcttataacagaagctgacattctgtagccctttctttctaattttatagaagtcgaggtgaataacatgtccgaagaaaaagatgcactgcaaaaaaacaaagaagaactagaagcaaatatcgaccccctaacgaaacttcttgtttcagatgtactgaacaaaaacaatgtaacagaagataaaaaacgcaacttatcagaagctcaaaaacaagcgattattacaatggtaaatgaccttcaaaaacaggctaacgaatttgttgaaagagtcaataagaaaaaggcagatgctgaaaaagcagaacaagaagcagcgccgcaaaaaagacgtcgaacaacactgagagatcgcgtacgtcaaagaaaaaacgataatatttaaaataggtatctaaaaccatgatatttgcttatacaaaatatgaactgtcatcatctactaaagtaaacgaaaggaggaaaacaaatggaatcaagaccttactcatgggttgccctagataattcatgtacacacccgggtagcggctataaaagagaagcggtttgtcatgacgtttgttctggaggagaagatgctaacgcatttcaagattttgatcagctaagccttaacaaacaaacatctgaagaaatgattatcgttagagattcttgcgacattgatgttacgtctactgacactcaagttgctgcatccattcaagccgccctccaaactgctgtcattacaattgtaaacttatcaatagcagacggtgatttagcagatcaagtcatccaagacttagtgcaacaatctgttaacaagcagtcaaaccgtcaaaaactagtgattgaaaactctagaaatgttaatgtcacaacaaccgatacagatattgcactatcgatccaaacactgacacagacacttgccgctacaattatcgcagttggaatcctctaatctctaaaagcagagctaaaaacgctctgctttttcttattttccaagcatatgatgaatatatagacgttcacccacaccaagtggggcacgggtacatatgttgttaaggactaaagtcaaataccctataaagaaggagctgaaatcaatgagctgcggaaaaacccatggccggcatgagaactgtgtatgcgatgcagtggaaaagattttagcagagcaggaggcagttgaagaacagtgtccgactggctgctataccaaccttttaaaccctacgattgctggaaaagacacaattccgtttctcgtttttgataaaaaaggcggattgttctccacattcggaaacgtagggggatttgtggatgatatgcaatgctttgaatccattttcttccgcgtcgaaaaattatgcgattgctgtgcaacactttctattttacgcccggtcgatgtcaaaggcgataccttaagtgtttgccacccttgcgacccggatttcttcgggctagaaaaaacagatttctgcattgaagtggatctcggatgcttctgcgcgattcagtgcctgtcaccagagctagttgacagaacatcgcctcacaaagataaaaagcatcatcacaatggataaacacttgtaaagaggaatccccttccaaactctattacaggtgcaaatcattcagctgcttccagcgtgaggcagctgactctccatcatttcgccagtctcaaatttataaggcaggagggataatatgagccagaaaacatcaagctgcgtgcgtgaagctgtagaaaatattgaagatctgcaaaacgctgttgaagaagactgcccgaccggctgccactctaagcttttatctgtaagccattcgttaggcgacacagtgccttttgcaatatttacatcaaaatcaacaccattagtcgccttcggaaatgtcggcgaactcgataacggcccttgctttaatacagtatttttcagggtcgaaagagtgcatggaagctgcgcaacactgtcattattaatcgcatttgacgaacacaaacacattttggacttcaccgataaagatacggtgtgtgaagtgttccgactcgaaaaaacgaactactgtattgaagttgacttagactgcttctgcgcaatcaactgcttaaatcctcgattaatcaatcgtacacatcatcattaatcataagctggaaaagcttgcaggcctgcaggcttttctctatgtaaaaaaagctgtccggcaacatcagccgggcagcttttttctttttcgttaaaaaccgagcgggtgcaaagaggtaatatcatcgattgccagttcggttggggctccgtttccggttgttcgaagcaggacggaatcatttcttcttccgacaatcacgcccctgtacgttcttccattggcttcaatcaaacaaagcgctctcggcatgttatgaggcagctttgttaaaaaatcaattttttcgtggatcgtcatcttgctcattggctttttcacttttcgtgccggcggtgctttttcctccgctttatcagcactatggacagcttccggttctttctcaggcttccgggtctcaagtgcaggctcttcctttttttctgctttcgggggctcgtgttcgacggtttcttctacggcctgcggctctgctctctgttcctcttggctttttatgttctctggctctctcgcctcttgtgtttgctgactcactggttcggctgcaggcttttggtcttcttgcaggacatcctgtgccacagcttcctcctgctgcttctcatggtaagccggcttttcctcagcttttggcggagcgggtttgtcggcctttcttttgatgacaatctcctgcatggatgaccttgtagtttctgcataatccggctgaacaatatacatgagcggttttttatccgcgtttcttttcttattagacatcttcatccctccgattgtgtcatattctatctatatgacagaaagctgaaaatcagaagaaataaaaaagcaatccctattcgggattgcttgaaatagatcctgcttagcgggcagtgatatggaaacctgaatcaacgtgaagattttcacccgtaatcccgcgggacatatcgctgaacaagaacgcagctgtatcgcccacttcttcaggtgttgtcgtgcggcgaagcggtgcacgctcttcgatgtcttttaagatagagttgaaatcgctgatgcctttagcagataatgttctgatcgggccggcagaaatgctgttgacgcggatattttcttttcctaagtcagcagctaaatatttcacacttgcatcaagagaagcttttgctacacccatgacgttgtagtttggcatcacaagctctccgccaaggtacgtcaaagtgacaatgcttccgccttcagtcatcatcggacgtgccgctttgacaacagcagtcagagaatatgagctgatgttatgagccaaaaggaagccgtcacgatttgtgtttaagtattcgccgacaagctcttctttgttggcaaacgcgatacaatgcgcgataccgtggattacaccgacctgctccttaatgcttgcgaagcaagtttcgatttctgcgtcgtttgttacatcgcaaggaaggatgatggaatcgttgcggtctaacgttccggcaagctcatgaacagatttctccaagcgttcgcctgcatatgtgaaaatcaaacgtgcacccgcttcatgtaaagaacgcgcaatgccccaggcgatgctgcgtttgttggctacccccatcacaacaatgttgcggccttcaagtgaaaaattcatatgtataaagcctcctatatttaataaagacatagtattagtacctgatcttaatttctatcatatcataaccttgtccagatgaaaagcgcataccgtagcaaacgcaaaagagatcaccatcagctggtgatctcatcggcttgtatttaagctgtttcgtttaaaagcgaaatggtttgtcggcccgtgtcccgatccgatgccgagcgtattttccaccgcttcgcggacaaagttggccgcaatctcaaatgcctgatggatgctgtctcctttagccgtttgggccgttaaagccgcagcaaaggtgcagcctgtgccatgcgtatgcttcgtattgatataaggatgggtgatttgcataaacatgctgccatcaaaaagaaggtcagtaatgtgattgtcttcaggctggtgcccgcctttgataatgacatgctgcgcacccatcttgacgagctgctcggctgcttttttccggtcatccagcgagctgattgtcattcctgtcagcgtttctgcttccgggacattcggcgtaatcgcgtagcttcttggaatgagcaactcctttaaggtggcaactgactcatcacgcagcaaggatgccccgccctttgcgatcataaccggatcaacaattacacgattgaatccgtgctcgtcaatttttcttgccacttcttcaatcatgtcggcattccagagcattcccgttttgactgcatccggtctcaaatcctcagcaacagcgtcaatttgctgtctcaacgcctctacagtcagcggatgcaccccatgaacgccaagcgtattttgagcggttaccgctgtaatcgcagacattccgaatacatcaagctcttgaaaggttttaatatcagcttgtatccctgcgccgccgcctgaatctgatccggcgattgtcaatgctttatatatactcattacactacactccttttattacccgatccatttatgataaatggattttgcccgggcaatatcatttgttccatggatcaaagctctgccgtcccggaacagcaccattttcatatcatccgagcggcaggaaattaaatacgggttcgcagttacttcaagcccggcctgcctcagctgaccggcaagcgcttcaagatccgcttctttcgtaatagatgatctgatctgcaccgtgttcctgccgcacaatacagccgcttttgtttgattttcatatgacaaaaacggaaaatcctttgtgccgcagcttgggcatgcgtcatgtttgagactggccgctctcacttctgaccgctcatttttccacaaatcaaaggagcgcagcaccggctcgcactcctctcccgtcagcagcttcagtgcatctgttacctgaaagactgctacctgcaaaacagccggactgatgatgccggctgtgtcacatgttgctccgccaatcggaagtgtatcgagcaagcaatgcaggcaaggagtagaacccggcaccacggtaaaggtgaggccgtagctccctacacaggcaccgtaaagaaaaggaatcccttcctttaccgcagcatcatttacgatcaggcgggtttcaaaattatcagccgcatccactataattgatgcatccctaatcagctcgaagatattttctgctgtcacatccatgacaaggccggtcacatcaacatcgctgttaatcgaacggagacggcgctccgcagcagctgctttcggcatttcttttttgacatcatcttctgtataaagctgctggcgctggaggttgctccattcaacataatctctgtcggcaattttcacagagccgactcccgctctcaccagcatttctgcactggctgttccgagcgcgccggcgccgataatcacggcgcgcgcttctttcaattttttctggccgaatgggccgatcggagcaaacagctcctgccttgaatacctgcccgtcatacaggaagaccttctcccggactgcttgccgttccgtattgcttaagcgggatgcggcccgcctcataagaaaggcgccctgcttccactgcgagcttcatggcacgagccattttcacaggatcgtcagcgcccgatacagccgtattgagcagtacgccatccgctccaagctccattgcgtatgccgcatctttaggcgagccgattcccgcatccacgatgaccggcactttcgcctgttcaataataaatgacagattcaaaggatttaagattccttgtcctgatccaatcggagatgcacccggcatgatggcatgaacgccgagctcttccagctttctcgccagcacaacgtcatccgacgtgtacgggagcacaataaagccttcttcaagaagctgttcagacgcttttaatgtctcaacagggtcaggcagcaaggaacggctgcatccgatgacttcaactttaatcatgtcacaaaggcctgacgctttcgccagccttgcaatccgaaccgcttcttcagcagtgctggcgcccgctgtattcgggagaagcgtatatttggataaatcaagctgttccaaaaaattcggctgagatgcttcaaagatgttcattctccttacagcaaatgttaaaatatcagactcagaaacagctactgcttccttttgaatgtcaaacgatgggtatttccccgtgcccagcagcaatcttgattgaaatgattttccgccaattgttaacatgctcatccgcctcctacaaaatggacaatttcaatgacatcacgatcacaaagctcaacctcgtgatagcgttctttcccgattatttctttatttctttccacgataacgattttattttcaagctgatacgacgccagcaggtcttgaattgtacctgcgtctttttcccacttcacgtctttaccgttcagctgtagcatcatatctgaaccgcctccttgcgatcaattcggaatgcgtgcagccagtcttggttgacctctttattcatgatgagatcactgatcaaagcgcccgttgcgggagcaagcaggatcccgtttctgaaatggcccgccgcaaataaaatacggctgtcctcaggatgtctgccgatgtacggttttccatcctttgttcccggccggagtcccgcccaaaaacgatccaccttcatattctgtatagccggcagcatcgtttttgcttttttcataacggattccaatccgccaagatccggtgcttcactccagtcccccggcttcattgtcgcgccgacaaccagtttgccgctttttctcggtacgatatagcagtgatcatggtaaagcgtttttgtcagcgggatatcatcattccaaacggacaggcactccccttttacagggagaaaagcattgttcagtccaagctgtttaaaaaacattccgctccacaccccgctggcaacgacaacatgattagcccatacgtctccgctaggggtcttgatggacagggcttcaccgtcacgttcgacatgcaggacgggcgtatgctcaaaaatctccgccccaagcatttttgctgctttcacatacgccttgcaaacaaaataaggctccacatgcacatcatcctgaataaaagatgcaccaaagatgtcaccagacgcatacggctctttttctaacacctcttcttttgaataccagctgacagagtccaaatcgtccatctgtctcagctgcagcacatcttcttcagaaaatgcaagcttaaacataccgccgttatgctgcctgatatccacaccggataatgcataaagctcttctccaagacctttgtacagacgctgactgtgcatagcgaaatcaaaaaacgcgtcacgttcctcgcattcggcatgggcgcccagcattccagcagcggcacttgtcgttctgccgcccattgttccgctttcaaacaatgcggcgcttttgatttcctttgccaaatgataagcaatcgcggaaccgataattccgcctccaatcaccactgcttcataatgccttttcatagcgcatctcctttagcttacgggaatatcgtctggctgcttccaagggctcagcggaagacaaaattcctgacataacagcaatgccgtctgcccctgcttgttttacgtctcttaacctgtccggcgtcatccccccgatggctataaccgggatggaaatccgctgtttgatatctgacagcaaagatactcctctgccttcaagaccctttttgcaatccgtttcaaacacatggccgaacagcacgtagtccgcgtcttccttttctgcttgaaccgcttcctccagtgaatgcaccgacctcccgatatgaaggtgtggaaatctggctctgacctgcttcggtgaaaagctgccgcttggcagctgcacgcggtgaatagtagagaaaagcgcaatatccacgcgcccgttcatcaccagttttcgtttatctataccgccttcaaaaataagctcgagcagtttcaaaatatccgccgccgattttgagcgttcccgaatatgaataaaatcaacttcattctgaatcgtaatgatgattctcgctagctcttctaccggcttgctgtcatccgttatggcgtgaagctccacattcctccacctcttttatggcgctgtcagaccagccttcttttcgataggccattccccaaaattgatattcatagtagctggagatgacaaaattctctttcatcttggcacgcacttcctccgtgctgttttccgccagctcatcaaagcggttgatttgctcctcgacctgttgtctaaaccaatcaccgccatatgtgccaatccacttctgataaattggatgccccggatcacaatgcagcaatttctcaccaacctcgtaatagagccaatagcatggcagcagggccgctaagatttcagcgaaattcccgcttaaaaccgaacggtacatatgggatgtgtaagagtacgcagtaggagacggcttaaacgccttacgctcttcctcgctgatttccaacagctcggcaaactcccgatgaagcgccatttccgcctcatatgtaccttgggcatggcttgccatccgccccgttgtataaaggtccttcgcataagcggcgccaaatgactgcacctttgcaaaatgcgttaaataataggaatcctgaagtacgtagtatttaaaacggtcaatcggaagcgttccgtcaccgattccttgaacgaacggatggacaaagctcccctcccaccattctgcggctgcactgcggcattcttctgaaaacttcacaaatcattccccctctgaaaataaaaaaaccactttcccgcaaggaaaagtggtttggaattggcatagtaaaataacacaaataccgctccacttccctacgcaggtctgaacctgttcaagttatgagggtctaaaagtcacacttttatctcagcccttatgaaggacacccctagtggttaaacgaatacatattgaattgttctgcacctctatattaacacgaatccttatttggtcaagatttatccttccaatgttttcttaagatccgttacgtacccccgagatccggtgacaattaaacggtctccaagtttcagccttgtatccccatgaggaacgatgctgtccacacctctgaagatcctgacaaagatgacgtcacctgttaaagggaattcccgtaaaatgacaccatcatatttactgttctccatattaatttgatacagcgaagactcttggttcgtgagcagcttcatgacgccaggcgcttcaatcagtgcgcgaagcagcgtttttgtcgacagcagaatagaaaagatgctgattccctgctccttcagagctgcttcatgctccggtgatcctacgcttgcaatgactctttctgtacctttttcttttgcaagtaatgcaatgtctgcattcatatcttcatttcctgtcgccacaacgaggatatccgtttcaaaaatgccgagtgattcaagcgtctcgtgttcatagtcagaaattgtttcaacagcaaacactgattctgacagcttttcctccgcattctcttggtagacgtgtacaacacgcacgtcatactcttccgctggcaattcgagtgtgacaggcaaagtcatttgattggcgccaatgaacgtaatcgtctttttctcctccggctgctcttcccgtttgtataattttttaaaacagatcggcgtaaaaatacttgcaatgacggctactaaaattagcgctcctgacatatttgcactaatcacgtgaagctgctgcccgattgttgcagcggcaatcacgagcgaaagcgttgatgtcagcaagaaaccagacgcgaaaatggttcggttatcataccacttctttaagtacatgacaggaatgattttgctgactaacagcgccagcagcaggagcggaatcatgattaaaattgttttatcctggaaaagagtccaaatatccagcttcacaccgaccatcacaaagaaaatcggtattaagaacccataaccaaatgaatccagctgctgaacaagttctttgtttggcgaaagcagggaaacgagaacccccgctaagaaagcgccaagaatattttccgccccaagtgattcagacagggcaacgagtacaatgattaacgtaaaaatggcacgcgtcccgatctggatcgtcccttttgacatggattgaacaaaagagcgatgtttgaagacccggccgaaaaagtaaagcaccactccggccgcaaacagaatcatcaggagccacatgtttccgctgtcctctccgtataaagaagaaaaaacagcaagaagaatcatcgtggccaaatcagcaataacagcaacaagcaaaataatctgcccgatattcgaattcatgatccgttcttcttttaatgttggaacgacaacgcctaatgaaatcgttgaaataatcagggtcatcaaaaatgcattttggataaatccggccaagacgaacccataggacaagagcaatgataaaataaaaataccgacgaaaataacagatgccgcagcaaacgtattcggcgcttccttgccattcggcaggaactgctttttctttcctttctcaaacgacgaaaaatcaatttcaagcccgcttaaaaacattaaaaagataaatccgagcatagagagtgtctggagccaggtgtcaccctccacaactaaattaaggccgcttttcccaattatcagccccataatgatttcagcaacaacaaccgggatgctgagtttaaaccgatgcaaaaggatgggtgtcaaaaatgcaacgataagtacaacaactaaagatgcgacagatgtatgcgccataatcagaacctcctttttaagtcagggttatgctagttctcactcagagaacaaaacctcatttttaaaaaacataacgcgattttaacaagggtgatgatgaaaaataaagtgataaggtcttaatcctgtttagaaaatgattcttcttctataatttgcacataaaagcttgtgatgactcacaacactttgcttcataataaataaaacaatcggtaaggaggagaccgcatggcttacgatatcatcagcgatattcatggctgctatgacgaaatgactgcattaatccaaaagcttggctatacaatcaaaaatggagtacctgtccatgaagaaggcagggtgcttgtttttgccggagatttaactgacagagggcccaaatcgatagaggtcatccgatttgtagccggcgcttacgaaaaaggcgctgtacgttatgtcccgggaaaccattgcaataaattatatcgttacttaaaaggaaatccggtaaaagtgatgcatggtctcgaaacaacagcggcagagcttgaggaactttccaaagatgagaaaaaatcagtcagcgaacagtttatgaagctgtacgaaacagcgccgctttacgacatcttacataatggagaattagttgtcgcccatgctggcataagagctgacgatatcggcaaatatacccgcagagtgaaggactttgtgctttacggtgacgtgacgggtgaaacatatccggacggcagacccatcaggcgtgattgggcggcagcctataacggaaaggcttgggtggtatacggtcatacacctgtgaaagagcctcggaaggtcaatcgcaccatcaacattgatacaggctgcgtgttcggaaatcaactgacaggctttcgttttccagaaatagaaaccgtctctgttccaagctccctgccttacgacgaatcaagatttcgccccatataaaaaaggagagaatcaatgattctctccttttatcagttttctcatatcctgaggcagtggagcatgaaacgtcatgttctcctgtgtcagcggatggataaacgaaagatgctcgctgtgcagagcctgccggccaatttcctgtctcgttccgccgtacagtgtatcgccgcacaacgggtgcccgagataactcatatgaacacgaatttgatgggttcgtccagtctcaagctgcaacgtcaccgaggtcatatcgtcatttgcacatgtgacgtaaaaatgcgtaacagccttctggccgtctggcgttaccgtccgttcaattatactgtcaggatgtctgccaatcggagcatcgactgttccctccatctgtgccatccgcccgtgaaccactgccgcataccggcgtttcacaaggccgtttttttgcgcagacgataaaatggagtgggcaaatcgatgcttggcaacaagcatgacacctgatgtatcccggtctaaccgggtgacaagatgaactgtcgccctcactccggttgtttgataatgatcaataattccattggcaatgctgccggaggggtgctctctcgaagggattgatgacacatacggctgcttgtttatcacaagcacatgttcatcctcataaaggatatcgagcggaacaggctctgccaacagcgtctcgctcacctgctcctcaggaaacttcacgataagaagatctccctctttcaaaacgtatttgaccgtcacatgctcaccgttaatctgcaggtcgcccccgccaaacttaatatcggtcagcagacgttttgaaattcccagttcactggcatattcctttacagtcatcccgtcctcagcggaagtaatgttctttctgataaaaaaatgctccacgatatgtcctctttctattcaccttttccaataaacgaatcctggactcttttccaaaatggaaacggacggaatctcgcaaaccgcactttttcggatgcaacttggcagcggatcgactttacatccttatggagaagggttaaatggtcaatcgtcacttgaaagtcaacttcgtttctcggcttaatcatgcaatcatgatgggatgggagaagcagaggtgacccgaccgtacggaacacgcggttattaattgaagccatttccgcaagctggatcgccctgatagacggatggataatcgctccgcccagcgccttattgtaggctgtgctgcctgatggagttgacaggcagaggccgtcgccccggaaggtttcaaagagctgccctttgatttccacatcagcaacaaggcttccttcgatgcttttaatcgtacattcattcaaagctaagtatctttcttcccgctcgttttcgtgataggtcacaatgacttcgagaagcggatattcgactgtatgatacggcgttttcgcgatggcaagaacaagtttttcaatttcatgaggaacccagtctgcataaaaacccagatgacctgtgtgaacgccgacaaatgctgttttgtccaagcggtcgctgtatctgtgaaaagcatacaaaagcgttccgtcgcctccgactgaaataacgatttccggttcattttcatccagttccatatcaaaatccaataaatacgcctgtattttgcttttcagcgtatcagaaacttgatctccttttgatgatacggcaaatttcatgctcttcttcccctttacctattgttgctcgcttccttttttctttcttgaaaaggcagcttgagcttcctgtacttcacccctgatctccgacatctcttcatcaagccgggaagccgcttcagaagcgcgctgaagccttagttttactttttcaggaatgtttccgctgtatttataattcaatgaatgttcaatggtcgcccaaaaattcatcgccagtgtacggatctgtatttctacgagaacatgcttttctccggataccgtctgcaaagggtacagcacaacaagatggtatgatcggtatccgctctctttatgttccgcaatataatccctctgatccacaacggtgaaatcttttctggcaaaaagcatctcttttacgatttggatgtcatcgacaaattggcacatgattctaaggccagcaatgtcctgcatggtttcaatttcatgcagcggtatgcttttccgtctcgctttttcaagtatgctcgccacaggcttgacgcgtccggtcacaaattcgatcggtgaatggtcgtcctcgtattcatatagtgtgcggatccccttgagcttcactttcaactcttcgacagcctggcggtacggcactaaaaaacgctcccattgtttgtcatccatcatacatcccccaattccgaaccagtttctataaaaacacgcgtttcactttttcttccatttcttctccatagtttgcattatcttttatattttctaaaagatattccagctccttatgcaggcctgccagttcaattgtttggtctcctgcctctaaaacaaccggtattttttgtgcatgggcctgcttcagttccggccatacatgttcctttataatgacatattcaaaagaatcagctaattcaagtatgtatacaaaagcaaagtggtcagaatcaacaagcatttgacctgacggcttgcgttccgcttcgtttccttctgtctgacaggcaaggcgaagctgatcatccgataatgttgcattcaaaatttcgattctgttttgcataatgctctccttttttaaacaaagtacagattcattttatcatatcgagctcgatattgataaacctaacatctaaagagataatagtaaaaataagatttacagggcggaaaggaagagcatcatgagccaagagattgaaatcgaatttaaaaacatgctgaccaaacaagaattcaaaaacatagcagcggcactccagctgacagaaaaagattttacagatcaaaagaatcattattttgatacagacagcttcgcgctgaaacaaaaacatgctgcgcttcgtatccgcagaaaaaacggaaagtatgtccttacattaaaggagccggctgatgtggggcttctggaaacgcaccaacagctttcagaggtatcagatctcgctggattttcagttcccgagggccctgtgaaggaccagctgcacaagcttcagatcgatacggatgccattcaatactttggatctttagcaacaaaccgtgcggaaaaagaaacagaaaaaggcttaatagttttagaccacagccgatatttaaataaagaggactatgaaattgaatttgaggcggcggattggcatgagggcagacaagccttcgaaaagctgcttcagcaattcagcattcctcagcgcgaaaccaaaaataaaattctgcgtttttatgaagaaaaacgaaagtctatataaggtggaatgacatcgtgaatgtaacgaattgggcagcattacttcagcttcaggcattacagtccatatctaatgcacgcagcagcacggacactcagaatacggaaagcccgctttcaagtttcagttctttgctcagccaatatacaaacggtctgacatctcagcaatcagcaccttcttcatcgccaagcccgctcagcatgctgaacagcgcgaatacaacagcgccgtcactgctttcagcgtatgggcttaactcatatacgagcagcaattcaagttcagtcacaaaagcggcagaaagcactgaaacagctgctgcagattcagcttcaaacaaacatgaagcaaatcagatcagttcgggagacttctctattgacagtgcgattaaaaaagccgctgataaatatggcgttgatgaaaaactgatccgtgccgtcatcaaacaggaatcaggctttaatgcaaaagcggtcagcggagcaggtgcgatgggcctcatgcagctgatgccgtcaacagcaagctcacttggcgtttccaatccgcttgatccgcagcaaaatgtggagggcggaacgaaatatttaaaacaaatgctggataaatacggcggcaatgtgtctatggcattagcggcttacaacgccggaccggggaatgttgaccgatacggaggcattcctcctttccaagaaacgaaaaactatgtaaaaaaaataacttcagcttattacgcgtaaccagaggtgctctttccctctggtttttttgcggagtgaaatcttacgcattcctgatttttatgtgatatgatatgaaatacaaaccccggctgtcagccgaaatgagtcatcaaacgcataaaaggcagtttgtttgtagaaatgatgccttgttgctaaaataaatctagatgaaacaatgaaatacagaaaattactttttgcaataggatttatgattcctattagccatatttaaaggagtagtcaacatgggacaatcgtttaacgcaccttatgaagcgattggagaggaacttctatcgcaacttgttgatactttttatgagcgtgtcgcgtctcatcctttgctgaagccgatttttcctagcgatttgacagaaaccgccaggaaacagaagcaattcttaactcagtatttaggcgggcctccgctttataccgaggagcacggccatcctatgctcagagcaaggcatcttccctttccaattacaaacgagagagctgatgcgtggctcagctgtatgaaggacgcaatggaccatgtagggctggagggcgaaattcgtgagtttttgtttggccggctggagttgacagcaaggcatatggtgaatcaaacggaagcggaggatcgatcatcttgacaaactatcagcatgagctatacttcgcccattgccacggtcatccaaaaaaaccgcttgaaatttatatgtttgtagaccctttatgtcctgaatgctggtccttagagcccgtcatcaaaaagctgaaaatcagatacggacgttttttcaccttacgcattatcgcttccgcaagccttaccgctttaaataaaaagcgaaaaaagcatcttctcgcagaagcatgggaaaagatcgcgagccgctctggcatgtcatgtgacggcaatgtctggttcgaacaggatcagccgctttcatcgccttatatggctgctctcgcttttaaagcagccgaattgcaaggacgaaaagccggcatgcaatttctcagaaatatgcaggagagcctatttgtttcaaagaaaaatattacggatgaaaacgtgcttttggagattgctgaaaatacaagtctcgatcttgaagaattcaaaaaagatctgcattctcaaagcgcggtcaaggcgcttcaatgtgacatgaaaattgctgctgagatggatgtttctgttaatccgacactgacgttttttaatacgcagcatgaggatgaagggcttaaagttcctggcagctactcatatgatgtatatgaagaaattttatttgagatgcttggcgacgagccgaagccgtcggaaacaccgcctttagaatgttttattgaatatttccgcttcgttgcctctaaagaaattgcgcttgtatatgatctgagccttgaagaggtagaaaaagaaatgaaaaaactggcgtttgctaaaaaggttgccaaagtggaagccaaacacggaatgttttggaagtctctcagcacttattctgatgaatatcaatcatgtgaaaaatagccgcaggcgtgcatatgcttgaggctgtttttttacgccctgaaccaaacgtacgttctatttttaacactaaagaaaccgcgccgggataagcgcggtttcatatgtcttaacgacaacaaaggggatgggagaaatttttcacggtcaaacaaaggggtaatgtttgtttgtgatcaatttcacatccttatgataacaaaagatgtcgacttttgacaacctctatgcttaatgttcatatttttgtcacaaaacataacgaagtgcattcactcatatccttataaggaaaaaggacaaggaggaccgccatgatgtctactttgatctcaattgtgtgcattgccgtttttttctgcttgaatatcttaggcatgatgcatatgctgccgctttatattacctctcctctgctgtttctgtctattttgtttaccctctaccgcttgaatcaccggaaaacctttaaagggttttaaaaaagcctgtgcgtcatttccgcacaggcttacttttttaagactgcttgactttcatcagcagctcttccatttcatcaagtttttcttcaaacattttgcacgcggcttcgattggctcaggagacgtcatatcaacacccgcttttttcaggacatcaatcgggtattgtgagcttcccgctttcaggaagtcaatataacggtcaaccgccggctttccttccttcaaaatctggctgcttaatgcttgggcagcgctgtaccctgtcgcatactgatacacatagtaattgtaatagaagtgcggaatacgcgaccattcaaggccgatttccttatcaatcaccatgcggtctccaaaatactttttattcaggtcgtaatagacatttgtcagaagctcaggtgtaagcggctcgccttcttgcgcctttgtatggatcagatgttcaaattcagcgaacatcgtttgtctgaaaaccgttcccctgaagccctcaagcatatggttgagaatatataagcgctgtttttcatcctctaaattgttcagcagatattcgccaaggagcgcttcatttgtcgtagaggcaacttccgcgacaaagatgctgtaattgccatatggataaggctggtgctttctcgtatagtagctgtgtacggaatgtccaaactcgtgcacgagcgtaaagagattattgacgttattatgccagttcatcaaaatatacggattcgtgccgtaagctcctgatgaataagccccattgcgtttgcctttattttcgtaaacgtccacccagcggttttccagtccttcttttaggatagaggcatattcttcccctaaaggtgcaaggcctttcagcatgtaatctttggcttcctcgtatgtcaccttcatcccagcatctttcacaagcggtgtatacaggtcatagatatgcacttcatcaagctcaagcactttctttcttagcgcaatatagcggtgcaggagcggcaaatgcttattaatcgtcttaacaaggttatcgtatacttcctcaggaatactgttgttagaaagcgcagcctcacgcgcggacttgtactttttcactctcgcgtagaagttgtcctttttcacagtgccgctaagcgtcgtggccattgtatttttatattgtccgtacgttttatacactgcgtcaaacgcatttttgcggacttcacggttttcactttccaagaaattaataaagttgccgtgagtgatctgtttttcattcccatcttcgtctttaatggatggaaacgttatatctgcgttatttaacacactgaatgtatttgaagatgaccccagtacctcggaggcttcagcaagcagtgcctcttccttctcgctcagcacatgcggacgttcctttgtaatctcctcaatcgcatgagagtacagctttaattcttctttttcaagaatgaactgctgcagtttgtcttcttctatggataaaatctccggaaccagataagctgtcgcgcttgcggcctgtgtatacaggtttcccgccttgtcattcagcccctggtaaaaggagttcccagtatcctggtcagagcgcatatgcgcatatgtgtacagcctacccagccgctccatcactttatcttgatacgtaagagcctcgtataaatgatcagctgaatctgccagctttcctttatacttagataaattcggaattaattcttttacagcttgaaattctttattccaggcctcatcactaggaaaaatatcctcaagtctccatgtgtcttctgcctttacctcacttctgtcaggcagttggtttgcttttttttcctcagccatggtgatccccctcgtcttctttgattcaagccaattgaaaaaacagctgtttctcaataaacttgtgttgtgaatatcttccggtttttcactgccttttgtcaaatcatatgcagtaatgaagagaacgaatgccaaaaaagcagtaaaaacacgaaaaacctttccttttgtgcctttcacagcctgcccaccacctttgtcttagggtgagccaaataagacaaactcattctataaaacagctgcggtctctttctatgagatcctgcatggagtgtatgccgcctgcaggctgattcagcacatatacttctttctgagtctcccttaaaaatcccttcttgcacaaaaaatcaatatactgtttaaccgcttctgaaagacactcttcgctgcattcaaacctgagtgcaatgttcttattatgaatgtgcagtttgcactgctgcaaaacggctgaaaaacgaattggcgcacgtttacctccaagatccgtcataaacaaataaagaaacccctgccacacaaaaaccggactcttaaaaactgccccttttctaacaggaacaaacacttcagtcggcagaaaagaaaaaggcgtctgccgtttctcataaaacagcagcctaaggcgatttgtttcctttgagttaaaccgatggggtttatggcgaaaacggtgaatcgctttcgtccagcctgaatattgaattgagggtttcggttcagtgaaaaaaagatcgcctgcacctgcccgatggatagggatcgtttggactgaggaataagaatggtttgtgtagaatggaatgatgtggctgagccggagaaaagaacgcctttcaggacaataacatatcagctctctgtatggacttgcattgataaactgccaatgaaaagctgaaagctgataaaaggacgaagcagtccgttttaagcggctgtatcccataatccactgcgggatgattccttcttgtttgaagccctctgtccgcttttgaaagacatctggagcgatagtggcgcattgatattcaacagcaagcatatgctccttgatccttgccatgacgtccggtctttggttgattgtccttatatacggctccaatattggtgaagcccgttgtgttttcagccatacatacagctgtctttttccttctaagtggtaggcgctttccggttcgatgtctatggagcaggacttgttctgtttatgggcaaaatgcggcgctttttgaagtccgagcttcacagctagctctcccccgcataccggacagaagaaccgtctccgctttaatttctggttttgctgagcgcctagaaggtgaaacagttggccgtcttcagtcacagcactaaacaattgtcatctctcctttccagatgaagtatactttctggaaaagatgatcaactcctgttcgctgtattttctgcttgtctatatgtttttgatttttcacatctctaaaatggcattttcgtgcataaaaaaaaccgatttccggaaggaaatcggtttgctatgatgcaaagtgtttttttatcgtttctagagcatgctctgaaataatcagcttgccgtactcttcaagacggtgtatgctgattgaggattcagttgcgtactccagcaggatgcttagctgattttcaacctcttcatcagtcatattgcaaaaatctacatataaataatatcggttctcaaacgaatataaagtcgttttgcttccgttaacgttcaatttagatagagaaataacatcctcaaaatcgccaaatcgcaagacaaattgaagcttttgctccttctcttcctgattgacggcttgctcttctttctggaaatcatccagcaaggcgtcaagatcctcagatgctggttcttgctttttatcctcaggaatcggcagttcgagcttttgtccgtctttggaaagctgggcttttgtgacgatgatttctaatcctttgtccagtgcctgaacttgaatccaaagtgggccttccacagcgaattcctcttcttcatgaacttcatccatgacttcccagaaaagttcttcactgcgctcacggttataccaaatttcttctctgtcaaaaccgcgatcttcaatatctccgtaagacatataaaattttactgtatgctcgttaattctttcaatttccatttgccaaccttcccttctatataagatgttgaagggacatctaagctcccgattaattgtactttactacactttacccattccgtccacatcttaaccttaaccaaggccagtgtgaattcctttgtatttctattttatgataaaacagtcacaaaagaaataaaaatgcacctttgcctaaaaaacggcagatcaggcggctgatatcataaaatatgacctgtctcatatagtagtagtacaagcgaaggactgaaagcgaggtgccgcttcatggagcatgactatctgatttctctgctcgtcattgttgggattgacctgatcctcggcggagataacgcggttgttattgccatggccagcagacatttgccggacaagcaaagacagcaagccattattctcggaacatttattgccgttgccatgagaatcggattaacaagtgcagcagtatatcttttgaacattccgttcttgcagtgcgccggcggaattttcctgctgtatttaggatatcagctgctgattgaaaaaaaagacacgaaacacattaaaagcagcacctccctgtggagagcgatacgaacgattgtgcttgcagatctctttatgtcgctggacaacgtcatcgcagttgcgggagcttcacacggtgagttttctctcgttgttataggattgtgtgtatcggttccggttattatttggggcagcaaactcatccatattgcactagagaaaataccgcttctgatttacgcgggaagcgggctgcttgcttatactggcggagaaatgattgtcagagacaaaaagctgtctctttttatggcgcagcacggcacagttgaaacgctcctccccattttgacggttgcgtttgtcatccttgcgagcatttattaccagcaggttgaaaaataaaagaaggctgatgactcagccttcttttgatgatacgatctattagtttgccaaacgctgtgcttctcttaattggaaagagcgaacttttcttggcaggaaacgtctgatttcgtcttcgttatatccgacctgcaaacgtttttcgtcaatgatgatcggacggcgaagcaaccctggatgctcgttgatcaagcggtacaaatcttgcagcggcatagattcaacgttcacattcagtttttggaatacttttgaacgggttgagatgatttcatctgtaccatcctcagtcattcgaagaatttgttttatttcatcaattgataaaggttcagagaaaatatttctttctacaaatggaatatcgtgctcctcgagccacgctctcgcctttctgcatgaagtacagcttggtgatgtgtatagtgtaaccatttatcttcactcctctaattagtaggatgaacatctattttattcttaaattgaaattactctaaaaaaggaatctttacaggtattatactataaaaaagtaagtgtgaacagtatcctaagaaaaaaatgtgtcaatccagcaaatttttaatgttcatgatatgttctaattctcaattagcttaactgatcgaaaatatttttttgtttttcttcatcgatgatttccaagacctcatccgttttttcgtacgattccccgtaccatttctcgtctttataagtatgaatgttttcatatgtttgtttcatggcttcaagaatttcttcttctgattctgtttttggtgaccagtacagaatctccatcttgtttacttcattcgtagccaatgaccggcgccggtacccaattgactgagcatgcttgaaatgctctctttgataaaacctcaggcgtttttctgtatcagtatcatcttcatccacaggttccacctcgagcaatatgggcttatttttctttttcagcttcgcgatcaatttgccgccaagcccctgccctcttgcatccttagacacatacagataatcaacgaagataaaagaatcgaactccgcaaacattaaaatatgatgtttgccttcatctttatgataaatatcgcttcgctctttcagaagagcttccatatgcgcttttgatttcatttcttcaattggaaagtactcgctaagcttttcataccagttcattgatttgctccttatgagttcgttgtcttcatacttttagatataccccatttcttcttgtttaaacagccttacatctataaagacgtgcgaacttccgccatggtttcatttttttttcagcaaaaaccgagccagctgctccgttcattttgaagtgtatctcattgaactcgattttctcgcctgtaatgaaccaggcggggctgcgccagtgcaatcagaaatgtcatgatatataatgcagcagccgcgataaaagctattttcgcaccagcagcatcagccactagccccataatggagtaggtgacgcctgaccaaagagtcaaaatcgcattttttgcagccatgattccgattcgtttctgctcgggaataacctcctgcagcatggtttcctggcaaatatcacgcacctgataaaaaggccccattgcagcacaagccagagcgcataaaaatgggactggagaaaatgaaaacaaaagggtcagcgccgacattacaagcgagctgaacataatggcatagcccatattccgctcaaaaaaagaagaaaaacgaatggcaatcacactgccgacaattgcgcctataaaataggaagcgttaaacatcccccaccacacctctgtttcatgcaaaacagccgcagtaaatgcgaggagaatagcagatgaccatacggaacccgccaaagcttctatcatgtccattacagtaatgtctcttacaatagggatgatcattaaatccttccatatacttctggcagatgctgtttcagcagttcctacagcctcttcttcatttacatgcagcacactgatggaagctcccgatagaacaaacaggcaaatagcagcgccgacaatgagttcaaaagggacggcgtacgtcagaaggcctccaaggccccagcctgctgttaagaataattgattcgagagagagatcacaccattcgcttttacatattgcttctttggaacaataatcggcagcagcgcaaatcttgccggctgaaaaaaagcgcccgcgaaggaaaaacaaaacacaaacagcagcgtaatccaaaagaatgcctgtccgtgatgagtgacgctgtatgccatcaggattgtaaagaccgctctcagcagattcgctcccacaagcacctttttaaaaccgagaatgcgaagcaccggagagacgcaaaagcttgctgctatactcgcaaacgacatgaacgataaaataaggcccgccaaaaaaacagagtcagtcatttgatagacccggaccattaaaacgattgtgacgaggactcctgctaaagattgaaaagattgagacagcaatagtgcaaaaacatttttgttatgcagaaattgaatcgtatttcgcctccgtttttttcctctaattgtaaatgttatcattctcactttctatgaggacgcaaaaaaacccttcaagagaaatctcttgaaggattgatgaatcatgaaaaagctttaaattcggcttccgtgcacatcacaaaatgtcccggtttgacttcacggaattccatcgtttccccatcctttaattgatggacggacggatcatatttctggcgaacgcgatttctctcatagtctggatctggaagcggaatcgcagaaagcaatgattttgtatatgggtgaagcggattttcataaagctcatctgccggcgcaagctcaaccagtttcccgaaatacatgacgccaatgcggtcactgatgtatttgaccatcgataaatcgtgggcaataaacaggtatgtgagccctttttctttttgcagttctttcattaaattcacgacctgcgcttgaatggatacatccaaagcggaaatcggctcatccgcgataatgaattccggatcaacagcaagagctctggcaatcccgattctttggcgctggccgccggaaaattcatgcggatagcggttcgcgtgttccttgtttaaaccaactgtttccaatagttcatgaaccctctgcatccgctcttttttcgtttttgccagcttatgaatatcaagaccttcagcaataatatcagcaactgtcattctcggattcagggatgcataggggtcttggaaaatcatctgcattttgcggttgaattccagcagctttttccgcgattttctcccgtgcacattttcaccgttaaacagcacctcaccatcggttgcttcgtacagccggataatgcttcggcctgttgtcgatttaccgcagccagattcaccaaccagccctaatgtttcacctttatagatatcaaatgataaatcatctacagccttaaccgttcccctcggcgtgacaaagtgctgttttaaatgtttgatttctaatagtttttcagtcaattcattcaccttctctcactaagacaggtttttcaaacgtgtttgccagtttacgcattttcgcttttaccgcttctggcggctctacctttggcgcgtcgggatgaagcagccacgatttgacataatgagtatcagataccttaaacattggcggctcctgttcaaaatcgattttcatcgcataagggctccgcagggcaaaagcatctccttttggcgggtttgtcaaatcaggcggtgtgcccggaatggcagtcagctcttcctctcctgaactttccagtgtcggcatggatgcaagaagcccccaagtgtacggatgtctcggatcgtagaagatttcgtctaccgtaccagtttctacaatctgtcccgcgtacatgacagcgacccggtcagcaacgttagccacaacaccaagatcgtgtgtgataaagatgatggacgtgtcaattttcttttgcaaatccttcattaattccaaaatttgcgcttgaatcgttacatcaagagcagttgtcggctcatcggcgatcagaagtttcggattcgctgcaagcgccatggcaatgacaaccctctgtctcatcccgcctgaaaattcatgcggaaattggttcacccgcttttccggcattgggataccgactaattccagcagttcaaccgcgcgttttttagccgcttccttcgagatcttttcgtgtttaaaaagcacttccgtaatttgtttaccgaccttcatcgttggatttaaagaggtcatcggatcttggaatatcatgccgatctcttttccccggacattttgcatttctttttcggacagcggcaccagatcctttccttcaaacaggatctcaccgcgtttgaaataacccggaggcattggaatcagcttcataatcgcttgagaggttacactttttccggaacctgattctccaacaatggccagcgtctcccctttatccagatggaaattcactccgcggatcgcctggacctctccgccatatgttttaaatgaaattgctaaatcttttacttctaataggcgtgtcacccgtatcactcccttatttacgtaacttaggatccaatgcgtctcttaatccgtcgccgacaacgttaaaaccaaacattgtaatgcagataaatccggcagggaagaataaacgccacggataataggtcaatgcaggcaatccgtcagaagccatcgttccccagcttgccagcggagccggaacaccaagtcccaaatagcttaaaaaggcttctgtaaaaatcgcagtaggaactgtcagtgtcatcgtgaccaaaatagaacccattgcgtttggcacgatatgtttaaacagaagacgggatgtttttgcacccagtgtctgtgaagcaagcacatactcctgattcttcagctgcagcacttgtccgcgcacgattctggccatattaatccagcctgtaatcgtcatggcaataataatcgtaaatagacctttcggaagaacaaccatcagtaagataaccattaataatgaaggaactgcccaaaggatatcagcgatacgcatcatgatttcgtccgttctgccaccgcggaagcctgaaatgctcccccaaatgacgccgatcagcaaatcaagaacagcagctgcaacaccgataaagattgagattcgcgcccctacccatgtacggacgaaaatgtcccgtccaagatcatctgttccgaaccagtgatcttttgaaggcggcttatccgcatttaagagattagtagttgaataatcatacctcgagaacatcggcgcaaaaattgccataaggataataagtacgataatgataagcccgaccattgcaagcttattgctgcggaagcgaagcatcgcatctttccagagggaaaggctctttttacttattttttctgcatcgccggcattcgctgcggctggttcaaacatgttttttggaatgttctgcatggcctaggctcctttctttgctttggaaagcttgattcttggatcaataatgccgtataacacatctacgattaatacacacaatagcaagatgacactgaagaacaccgttacacccataatgaccgtataatcacggtttgtaatactgttgacgaagtgtgcaccaagccccggaatcccaaaaatggtttcaataatgaagctccccgttaagacctgtgcggccatcgggcccatatatgtaacaaccggcaaaagcgcgtttcgaatggcgtgccgcactgtaaccgctgggcgggacagccctttcgctttcgctgtgcggatataatcactgtttaacacttcgatcatgcttgaacgggaaagtctggcaataaacgccatcggcatggaagcaagtgcgattgaaggcaaaaaggtgtatgcccaggaatcccaccccgcgaccggaaacagcccaagcttcatggagaacacatattgcagaacagccgccatgataaagctcggaaccgaaataccaaatatcgttaaaatcgcgacggtataatcctgccacttattatggtaaagggctgcaatgaccccaaacaatacacctaacgctaaagcgaggagaatagcttctgctccaagagtgaatgaaacggggaaacctgaactgatcaggtcgttaacactctgacctttatatttaaatgacggtccgaaatcccacattgcaactgatttcaaataactgacatattgtacaaacagcggcttgtccaagccataatgcgcatttaaatttgcttcaatttcaggcggaagctttttctcacctgaaaatggcccgcccggtgctgcttgcattaagaagaatgtcacagttacaatcacaaatagtgtgataatcatatagactaagcgtcttccgatatattttagcaagggggaacacctccatggtttttacatttttatactccatcagtaagaaaggtatatggggcttttctccccatataccttgaggtcttttattttcagacgtagccttatttaaaatatgcgtttctgaaataaacctcaccagtacctggcatgataacaccttttaggttttcatcctgtacccaagtatcagtatagaaatagattggggcaaccggcatttcatcaatgaaaataccttctgcttttttcagcagctctgcacgttttgttttatctgtttcagtttgtgactgattcagaagctttttgaattctggattttcccagcctgtatcgttatttcctccgtttttgtcacggaacaattcaaggaagttgataggatcattgaagtcgccgagccagcccatacggccgatttgataatcttggctgtggagcttatcaatatagacattccactctgagttatcaagctcaacatcaacgcctaaatttttcttccacatttcttgtactgcttgagcgattttcgcgtgtgcgtcatcagtgttgtaagacaatttgatttttggcaaatcagatgccttgcttaagcccatttcttttaggcctttatcaaggtattcttttgctgttttgacatcattgtctttgaagtatccttctttgttatcctcaaatcccttcattgtaggcggcactgcagccattgccgggatttgctctccttgcgtaacgtttttaacaatcgactgacggtcaagcgaatatgttaaagctttacggatatttacgttgtctaatggcttagcttcagtgttgaatttgtaccaatacacacctgcaatcggctcaacatgtaaagaaccgtcttttttcagggtcggcagggattctgtcggaagctgtccgagcggcataccggcccaatcaagttcgccagcttggaattttttcagttccgtattgttattgttgatcataaccatatcgattttcttcagtttgactttgtctttatcccaatactggtcatttttttcgagagtaatagagccgctgtgtttccatgccgtcattttgaacggcccgtttgatacataatcatctccggcatttgtattccactttttatttttctctgcaattttcttattgatcggcatatacgtatagaacgcagttaattcagtgaaatatggagtcgggttatttaattcaaccttcagcgttttgtcattcacagcttttactgccacatcatctaggctgcctttgccggtattcgccgcttcagcaccttttatgtagtagagctggtaagcgtattgtgattcgttattagggtcaagcgcccatttccaagcatattcaaaatcttgtgcagttacagggtctccattagaccatttcacaccatcacgaatggtaaatgtatatgtctttccgtccttgctcgtttcaattttagaagccatgccttcttcaggctcaccatctgcattgatacgtgtcaatccttcaaaagtctgacggataacaccgcctgatactgaatcatttgccaatcccggatgtaaggagaacggctcagttttaatattaatgttaagtgtcgtctttcctttactgtcctttttcccttcaccgtttgatccgctgccgccaaagccgcacgcgctcagcacgagagtgaaaatgagcatcaacgtgacaatcgaccaacgttttttcatattcgcaaaccccctaataataattttcagctccttacggctaaatcctcagaaatatcagacaaatgaacctgagtttccgcaacttttattctgttccgtcttttctgattatttttgtaaaaaagctgtaacaatagagtgaacaagttcattataatgaaacaaataatttattgcaatattattttatcaatttaaaatatttaaacttcgttagtttttcttccatgaacataatatccttctaccatttaaagcataaattgattaaaaactttttcatgtgttttctgcccatattgctttttacatataatatctgcctgtttttacgctgatagcagttatcatttaaggattttacagcactcgtgttatttatattattacaattttactggaaaaaagaatgttttttcatgatgacaattggttataattgatttataatgaagcaatcaaaagaaaagcttgctatgaaaaagagtagtacacgtttcacctgtttgaagagagtctgcggtgctgggagcagataacgggcaatgtggaatggactttggagcagctgaccgaactggaaaaaagtaggctcagccggagcagtctccgttacaaacgtcagagtgattccattttaatggaataatcagggtggtaccacggttcattcgtcccttttttacaggggaagaatgagccttttttattatgttttaagaaatgaggttgatgttttcatgaaacaaacgattttttcaggtattcagccaagcggctcagtgacgctcggcaactatatcggtgcaatgaagcagtttgtcgaactgcagcatgattataacagctatttttgcatcgtcgatcagcatgcgataactgttcctcaagaccggcttgagcttagaaagaatattcgcaatctcgcggcgctttacttagctgtcggacttgatccagaaaaagcaacattgtttattcagtcagaggtccccgcgcatgcgcaggccggatggatgatgcagtgtgtcgcctatatcggcgagcttgagcggatgactcaatttaaggacaaatccaaaggcaatgaagctgtcgtctccggcctgttaacatatccgccgctgatggccgctgatattctgctgtacggaacggatcttgtacctgtcggcgaggatcaaaagcagcaccttgagctgacgcggaatcttgcagaacgcttcaacaaaaaatacaacgacatctttacgattccggaagtgaaaattccaaaagtcggtgcacgtatcatgtctctgaatgatccgctgaagaaaatgagcaaatctgatccgaatcagaaagcttatattacattgctggatgagccgaagcagcttgaaaagaaaatcaaaagcgctgtaacggattctgaaggcattgtgaaatttgataaggaaaacaaaccgggcgtttcaaaccttcttacaatttattcaatcctcggcaatacgacaattgaagagcttgaagcaaagtacgaaggaaaaggctacggcgagtttaaaggtgatttggcagaagtcgtggtgaacgcattaaaaccgatccaggaccgctattatgagctcatagaatctgaagaattagaccggattcttgatgaaggcgcggaacgagcgaaccggacagcaaacaaaatgctgaaaaaaatggagaatgccatgggtcttggaagaaaaagacgctaatcaaaaaaccgctctttgcaaagagcggttttttttagttgacctttgattcgttttccatttcccatagcttttcgaaaaaaggctgtccttttattaggttttcgcaaaaagctaggtgcttgtccgaccagccttcaattgtttcgttatacagcatgtcccaaatctcttcaaagctcatccttttgatttgttcatacatatgcggattccactctgtgtaccagtagccgatttccgcccggtttttcagcccttttaattggtcaagcgccataaacatcagctgcttgatttgccgttcttttctcgtcagtcctctgacatgttctggtgctaatgataagatgtgatattccttggaggattccagcttctttggctcaaattcatatgtttcaggctctacatcttttaccatttcataaacgagctgctcctgtcttgggattagacggctttttctgatagggatcgtgtagccgatcgtgtcgacagctaaaatgccgattccgtctgttacgacaaaacaatactcaagctttgtccgctcatgatttttccgaatgtacgatttctgatgtacgtcttcaagcaaacctttcggaagctctgacaaatcgttttctatgtaatgaaacagtactgacggcacccttaacagcggcacctgatccaaaagctcaaccgtatcttctttgcgccattcgtgaaagtggcatacattgtagccattttcttccccttcaaaccaattgacccacacatcatgaagaaataacatctctaacccctcacttttataaaaactgttgtccacagtataggcaagggatagagaaattattccaaagagattgaggaaatctggaatcactggttttatgtaagaatcacaaaaagcagatctctttgtatattttctaacaaaaggagacctgctttttttctgatttggtgatattttatcacagatattatattcatttttatttaatatttttcgggtcaagcgcatcccgcaggccatcaccgacaaagttgaagcataaaacggtcattaaaataaatagcccgggaaataacgggtaccaccatgcttgaatcattactgtgaaattctgtgcgtcttgaagcatgttcccccagctagcgattggcggctggattccaaagcccaagtagcttagcgccgattcagctagaataacagacccaactttcagcgtagctgacacgataatcggccctaacgcattgggcaggatatgagaaaaaataattttgtgcgtttttgttccaattgttttagcagcaagaacatattcccttgaacggagcgacaagaattctccccttactaatcgtgctgttgtggtccatcctgtgagacagaaaattaaaatcagtttgtccacacccggcttgaagatggtgaccagcgtgatcaacaagaaaatatcaggaatggataacacaatgtcaactacacgcataatgacagcatccactattcctctgaaatatccggctaatgctcctaaaaccgttccgatcaaaatcgaaccgactacggacgcaaatccaaccaataaagagacacgcgctccatataggatccggctgaaaatatcacgtccaaatttatccgttcccatcagatgttcaaggcccggcgccttatatttatcaagcaggctttgctgctcttggggataaggtgcaattaaaggggcgaaaacagcagacataataatgataaaaagaataacggcacctaaaatggccagtttgtttttcgagaatttttcccagaaaatctttgtcattgtttctggctttttcgaaatattttctttcagcctgatctccggcgagggagttgtttgcagctctgacatctctgtttccctccttttaatattcgatccgcggatcaacaatcgcgtaaaggatgtctgcaatgaggtttccgacaacgacaagaaccgccgagatcacagtcattgccatgataaccggataatcgcgctggaatgctgaatcgacaaacagctttcctaatcccggccaagtgaaaatttgttcgacaacgacagatccgccgataaatgaaggaatcatcaaaccgaaaattgtaatgacgggtaataatgcattcctcaatccatgtttaaatagcactctgttctctttaaatccttttgctctcgctgtgcgaatataatcttgatttaatacatcaagcatattggatctcgtgtatctcgtcagtccggccatgtcagctgtagctagaacgaatgcaggcagaattaaatgatgaatccggtcaaatatattgaattcggtattcagtgtctcgacacccccagttggaaaccagccgagatttaccgataacaccataatcaaaattaatccaaaccaaaagtttggaatagccaggcctataaacgaggtaaatgtaatgccatagtcgatttttgaatacggccgctttgccgacaggacaccgaacggaatagaaatcataagagccaaaatcgttgaaaccagcatcagcaggagcgtattgggtagtcttgccataatcaattctgaaacaggcgttccttttctgacaatagacgttccgaaatcaccctgcaccatgttgcctagccactttaaatattgaacgtactgaggatcattcagaccgtatttttcaataaactgctctctgtcagcctggctgattttcgggtccatcattaatgtcatcggatctccgggcgcggctttcatgataacaaatgataaaatcgtaattcccaataaaatcgggatagacattaaggttcttctgataatatatgcagccatatacttgtccccctttactttccttattaaaaacagaagagggagaaaacgctctccctcccctttaagggaaatttattttgcaagccaccatttttcaatattatacaaatcacgtttcggatgatatttgtatccttcaagattttccggcattgccatatggttgttaggataatacaagaacgtatacggctgatcttccgcaattttttgatagatttgctcatattcttttgaatactgctttctgtcactgattgattttgcatctttcatgagtttatccgcttcggcatttttataccaaacgtagttcaaaccctttttaatctggcttgaatggaaaatatcatattgatccgggaatgtggataaactccatcccatgaccattgcatcaaaatcccaattcggaggattcatttgttcaacgagagcgctccattcaacgatctgggttttcacttcaatgccgatttttttcagctgttcctgaacgacgacagcgatgtcttcacggactttgtttccttggttcgttttaagggtaaacgagaatttctttccgtctttatccagaatgccgtcaccgttcgtatctttccagccggcttctgcaagcatctgtttcgcttttttctcgttgtactcaaatttcggaacatctatatctttaggatagttccaagataaagggctttccggaatgtaagctacctcgccgtctccatctaatacttggctgacgattgactcgcggtcaagagcggttgtcagcgcttgacgaacctttttatccttgaataattcatttttttcattccacccgatgtacacataacttaatgccaaatcagtaacgatttttaggttgttgaatttttcagccgttttgtagtcagtggcgggcacattaaagaaattaatatcgcctgcctgcagctgagcaacggcagcatttgcgtcaggaatgactttatacgtcacagtatctaaatacggtcttccttcaaagtaatcatcattcgcttcgagcttaatatattggccctgcttccattccttaaacttaaatggtcctgaaccgattggtttctttctgttaaactcattttcttctaaatcagcaatcggaacattaccgagaatatgtttcggcagaatagctgtgctgtctaacgcattgttgtagaaattaccgtctttatatttcagcttaaacaagacttcgtaatcgccttttttttctacggatttcagcatttcatatgttgaaccgcgttctcccttgtaatctttgcttaaagggacactgtacgtaaatacgacgtcgtctgcagtcagttcttttccgtcatgaaacttaacgccttttttaattttcacatcatatgcaaggccgccgtctaattctttaatgctttcagcgagtgacaatttcacatttagtttttcatccgttttcgttaaaaagctgtacagcatattttcaatatccgtacttgcgtcatcggtagaatacagagagttaaaaagtgtgggttctccgattgaaccaacaaccaaatccccgccttgctgcggtttgcctgctgattttttcgcgctgctgttgcttgattttgatcccgagcaggctgataaaaagatggccagaaccatcaatacacttagcatcatcagtgcggttttccgtcttttcattagatattccccctcttgaaatgttcgttcttctcagctgttgtttatgtagtgtgcataccccctctcaaagctgtgcgggcaacattagctataaaggtgacaagccacaaagtggctgggagcagcttctttaaattctggtatttgttccttgcatatcggttttgcaacaggacatcttgtgtggaatacgcagccttttggcgggttggccggactaggcagttctcccttcaggacaatgcgttcacgtttgacagaacctctttttcttgtaaccggaacggaggataaaagcgcttgggtatatgggtgaagcgggttgtcataaagctcatgcttgccggtcagttccatcattttgccaagatacattactccgactctgtcgctgatatggcggacgacactcagatcatgagagataaatagatacgtaagattaaattcttcctgtaattcctccatcaagttaatcacttgggcctgaatggatacatcaagtgcggaaaccggctcatctgcaatgatcagctctggattcaaagtgagtgctctggcaatgccgatccgctgacgctggccgcctgaaaactcatggggataacggccggcaaacgacgggtgaagccctactcttgcaagcagctcttcaactttttcgtttcgttcacgcatggtatacatgttgtgcgtattaaacggctcctttatgatggaacgcagggtctttctcgggtttaacgaagcaaatggatcttggaaaaccatttgaatatttttgcggacactcttccgcagcttctcctctgacagattggaaatatcctgccctttaaaaagaatttggccctctgtcggtttgtacagtctgatcatcgttctgccggcagtcgattttccgcagcccgactctccaacgattccgagtgtttctcctttttttaacgaaaatgaaacaccatccaccgcttttacatcaccgacttttctttgaaaaaggcctgaccggatcggaaagtatttttttacgtcacgaagctctaagattgtttcttgattagctgctgtcatgattgttcggcaccctcttcctcatataaaaagcatctcaccgttcttccgcttttgtgtgtcaaaagcgaaggctgatttgtccagcacttatccatagctttcgggcaccttggggcaaaacggcaccccggcggcagattatccggtgtaggcacactgcctttaatcgcatttaatttatcaatctctccatctataacaggaattgacgtaagcaggccttctgtatacggatgaagcggttctaaaaataagtcatcaacagtggcgttttctacgacttgtccgcagtacatgacaatcactctatcggcagcttcagacacgacacctaagtcgtgtgtgatgagaagaatcgatgtattgaacttctgacagagatctttcatgagctccagcacctgggcttgtattgtcacgtccagcgctgtcgttggttcatcagcaatgagcagtttaggattacagctcagtgcgatggcaatcatcaccctctgtctcataccgccggacagccgatgcgggtactccttcataatttgctccgcccgggagaaaccgaccatctgcaagagttcaacagctcgttgacgggcttcttttttcttcatgtttttatggtaaatcagcacttcggtaatttgttctccgattgttaacaccggattaagggaggtcattggttcctgaaagatcatggatacttcgttaccgcggattttgcaataatcgttttcagtgaatgaggtgaggtctttgtcttcgagtttaatagaaccgtccatgatttttccgcctgagctttggacgaggcccataattgataaagaagtaatgctttttccggagcccgattcacctacaagcgcgacggtttcgcctttgctgatgtgaaaatcgactccgtcaaccgcagggatcggctcctttttcctgaaaaaataagtctttaaattattcacttctaaaagtgtgctcatgctagctcccctttcccccctcttgttgtcaaacgttttcaagagaaagcaatccctttattcagaaataataaataatattgaattatcgaaaaattttatagttgtatattattacaatcattttgcaaaatcaagaattttttaggataaatgtaatattattaatgaaattccattattttatccttttaaagcattgcatccaaaaaggtctcagcaggaatggacagcccgtctgcggtgcttgccttgctggcggttaaatatttttttacaatattgaatccaactgcgtatccaagcatttttggctgatatcctttgccgaataacagctggggaaataatcgattatcccgtttgatatcccgatggggcgcaatctttttttcatataaagcctgaagctgttccggtgtataccaagtcgtccattcagccgtttgacttcggccgaacctctcataaacagcatattccgccagcccttccatgatgattgtatcaagtaatgtgacatccttttcctcttttgtcagatgacctaaccggcaaacgtgatgatactcatgcgtcataagggcagataccgacccaaaatctaaatctgacgaaagaaaaaggaacattttgtcttgaaaggcgagtcctgattttgatccgaattctaaacggattctcctgtttcgttcatcaaccggcagcgtaacaattggtacatcaggaccttgccatttgtttttgaggtactgttcttccttttggatatgtccgtaaaaacctttttccttcagcttggaaaccgtctgaataccctcttttatgtttttaaacatcccatgatgctgaagatgccccagaatgcccttccagttctttttctccgcacctgaaaaaagcgggataatgtaatgcgccaaatcatctattgaaccggccttcctgagccagctatatgtttgttctacactcatgtgatcgcctcctcttttaatcctatgcacacaaaaaaaaccggctaccctttaagggcagccggtttggcttgattatgattgatattttttaaagattaatgttgcgttgtgtccgccgaatcctaatgagttgctgagaacataattaagttcctgtctgcgggcttcatcaggcacataatccaaatcacattcttcgtcaggtgtttgaatattgattgtcggcggaatcacgccttctttaatggccaggatagagaaaatggcttcaataccgccggctgctcctaagaggtggcctgtcatcgattttgtagagcttaccgcaagtttatgcgcatgctcgccaaaaacggtcttaatcgccattgtttcgtatttgtcgttgtaatacgtgcttgtcccgtgagcattgatgtaatcaatttcttcaggtgcaatgcctgcatctttaatggcttcttgcatcgctctcgctccgccttcaccgtcttgggccggcgctgtgatatgataagcgtctccggttgagccgtagccgacaatttctccgtaaattttagcgccgcgggctagggcatgctcaagttcttcaagaacgataatccctgcaccttcccccatgacaaagccatcacggtttttatcaaacgggcggctcgctgttttcggatctggattagtagacagcgctttgttggcactaaagccggcgaatgacattcttgtcagcggcgcttctgttccgcctgtgaccatcacgtctgcatcaccgcgctgaataaccttaaacgcgtcaccgatggagttcgttcctgtagcacatgctgtaaccgtacaagagttcaccccttttgctcctaatgcaatagaaatctggcctgtcgccatgtcaggaatcatcattggcacgaaaaacgggcttacccgtcttgggccttttgttaagaagatttcaaattgagactctagtgtttcaagtcctccgataccggagcctacccaaacaccgactctcggcgcgatctcatcggtaatgttaagatctgcatcttcaaccgccattttcgcagccacaaccgcatattgtgtaaagcggtccatttttctggcttcttttttatccatataatcttcaacattaaaatcttttaattcagcggcaacttttgccggatattcttcagcgtcaacacgagtgatcggaccgattccggacacaccgttgattgcgttattccaacttgtatcgacgtcgttgccaagtggagataatgctccaagtcctgtaacaactactctttttttagtcatcttgtgtgcacctcacctttttttatcggccccagcggattgcaatggcgccccatgttagtcctccgccgaaccctaccataacgaccacatcgccgtctttgattttaccggcttccaattcttctacaagagagatcggaatggatgcggcagaagtatttccatatttatgaacagttttagacatcttttcgacaggaagctctaaacgctcgcgagcagcttccatgatacggatgttcgcctgatgcggaatcaaaaagtcgacatcctcttttgaaagtccggctttttcaatgacatttacgcatgattctcccatttggcggactgcaaatttgaaaacttctcgtccattcatgattgtatgtcgtttttcattcagatacaagtgctgaccgcctgtgccgtcggctcctagttcaaatgaaaggattcctctgtcatcactgactggcccgactaccgcagcgcctgctccgtctccaaacagaacggctgtattgcggtcttcccagtcggtgatgcttgagagcttctctacaccgacaactagaacatgcttgtaggttccggattcaataaattgtttaccggttacaaccccgtacatgaagcccgcacaagccgcgctgatatccatagcacacgctttcttcgcgccgagttgttcttgaatcatacaagagaccgtaggaaatgactgatcaggtgtaacagttgcaaccaagatcatatccagatcctcagcagccacttcagcttgttccagcgcatttttcgctgctgcaacagccatatgtgatgaaaacacatcatctgctgcgattcttctttcttctattcctgttcttgtacgaatccactcgtcagaagtttcaaccattttttcaagatcatgatttgttaaaaccttctcaggaatgtaacgtccaacaccaagtattccagctttcattagggaagactcctttatatcttaaatttagaagatcaatcaggttgtgatcaattattagtatcaggtactaattctatcctattttttttcacatggcaatatattcgtctaaactatcagttcatcttactcatagagtatggtatatggaaaggaggcgtatgcagttggatgtgttttcaagaatgatgttcggcgatgcagcaaaaccaacagaagagaaggaggaggaacagcaagaggaagtttctcaggtttctcagacaaacgacgaagagacgattaattacatgcatattatggaccaaatcggttcaattatgaactctcttgatcaaatcaagcccgctttaaaggagcttgcgcctatgctctccgctattaaaaagaaaatcatgtgaaaagccactttcaaaaaagtggcttcttcttattctgtttcagatttagcgtcagacttgccaagctcataagcttccgccattaccgttgtaaatagattcataaacggctggatggcctccattgagagctcaatgcctgatttctcaaactgttctttcgcttcagggaaatatttcatggcaatttgcaagaattcaagtgatttttcgtgctgcatgtgacgtcactccattactcgttttttggcagctcgcctgttttgttgtatgttttgatcagcttggcgattctttgctgaaagtcttgatcgacgagcgggctgaatgttcccatctcaacgactcccgtgttcaggtcgtagtaatgatcgccgccctcaagggtgcctttattaaattgttcagcaatgatttcataggccttgtccacattttgcaccgtgctggttaatacggtattctcgcccagatccgattgatctgtgacgtaaccaatggcataaagaccgtcttttttgatttgctgaataacaggaacattatacccgtctccggcgggatacacaacatccgcgccttcgttcttcattttctgataaagctttactgctgttgtatcatcatcccaatgatccgtatatttcgtatttacctctatatccggattttcatacttggcccctttgataaaaccgtccacctcaggctgccacgtaaaggaagcaattacaccgacctgattcgttttcgacatatgggcagcagtcattcctccaaaaaagcccattgcttccccgctaaaatggacactcgttacattatcagctttcgctttcgcattggaaatgacgaattccatatctggataatcttcgccgaccaagttaaacacctcagcatattcactcccatggccgtagagcagattgacgcccctcttatgaaaatcctcaatcgcatttatgatatcttcttctgttttaacgccttctttataatagacgtccacattgtatttggattgtatattcagtaatcctttatacccttttgtgccccatacgaggtcattaatcgtatcaggaaagagcatgccgaccttctcaatttttcctttgaacggagtttttccacatccactcaataaaaggaggacagaaaagatcatgacaagccttgtgatcaagtcatgttcaactccttttgacaagctataacatgtattatttttatacgtttattgtatctagaaaactcgaaacatggaaggtttttcttaatatttgtcgaaaattgatgaaaattgtcttttccactcgataatttttgtttttgcttcttcttttgaggttttctctgtgacttgcaattcaaaaagctgatctttgctatgacggcttggttctaacaggaatctcagcaactcgtcagccacgtcgtttgtgtaatagccgtcttcctctgtttcttctttccatggcccatacattttcggcaggatcacggttttttccgagcctgttttttcacgtttttcccattcttttcggtcttcttcatatactaaaatataaggagaatcacattggtctaaaggcaaaaaacttccgaactggatacaaattgtatcataattttggtctccaatgtgttcaagctggcgaaagagttcatttctcccaagccacatgagtctttcttctaagtacatttgtctcattttatcttctgtttccgccagaacaacgtcaacatgtatgccttcatccatcattcgttcacataatgaaaggccgaaaaattcgtccgcacctacaatcagcgttgattccattgcatctgccgcccttccggtttttcatttcccaaaacaaaacagcctccgcaaaagagaaggctgttgtcattatattctctataattctttttcatgactgtgaaagaatttgcaaattgatgcataaattctgcttggatgctcaaataaatgaaatgtcatgtcgaccggtgagccttgcttttgctgtttttccttgaaaacttccgcatgtacgctgtagggatatggagctccggtcatacgctgccatatatgaaccggtacgccgctcgggtagctttgaattgttttataacgaagcgcttccgcttctttttcagaaattccgtagcttttcgaaacttctttcaaaaattgcttatagaaaaatttattttctttttccgattcataatgtgcctgaagatcgagacaaggattcaacattgcggctgagcggatatgatccggggaaaaacgaagcagttcatcggccacgagagcacccatgccttctgctaaaatatgaatcttcggattgaggatttcctgcttcagcacagaatgtatcagctgtttggcataggtgactgctttttccgccccccaatgccttccgaacagattgctgttaaaaagagtgtatccttcattcctcaacatgctcagaagctgatttctgccataatgctgctgccaaaagcttgaatcatgtccgacaaagtgggttctgtcccccaagataaagatgccgaagccgttcgggcgatagggcagatgaatgacattatgctccgttcccagttgaaagtatctttccgttattcccatcgcttgcccgcctcctttcacacttcatctcacgctatcttatgtaaatagaaaagaaacgaataaggtaaagtcctagccttttacatttttggctattatactgattgacgttttatattttaccattaaagtgtgacgaatcagactcttttgtcacctcactttctgctaaaattggattcccccttcgctttttgtatggtatgataacttttagaatagaatgagaaggacgaggtggaaacgtgcgatatattattgcctttatttggacgttccttttatcacatatggcatgctacttggttgcaagcatgaacagcgttacgtataatttcaaaacatcatctgtcattgctgttgtactgtatgtcttaatcatggttttagcagaaatcatgcctatgaacaaaaatgcaagccagcattaaaaagccaaaaacccaaaacatttattgttttgggttttttagtggtcacggctttcttttgtaggtccacagccggttgtggtttgatgtttcggggaacatttcccctgctgacagatggaccttttgagggtttttaaccatgctccctgtctcgccgatttctacgtagacaccgttattaggcgctttctgtccgggccggaattggtgctgctgtcccactgtttttcctccttttcctttttgctgtagtatgcgcctaagcggctgtgaatatgttgccatcaaaaaaactgctgagtttggctcagcagttttttgatgattcccctttgtataaaatggccttcagcagtgctttttgcacatgaagacggttttccgcctgctggaacactgcagagttcggcccgtcaataatctccgcagtcacttcttcctcacgatgcgcagggagacaatgtaaaaatgtatagtcaggcttggcatggctgacaagcgccgcattcacctgataaggcgcaaagacagcaagacgttcttgctcttccgcttcctgccccatgcttgtaaacacatcagaataaattacgtccgcgtcttttacagcttcaatcggatcatctgtcagcgtgatagaagagccggattgaagtgcatatgtttttgccgcttcagctgcttcatctaacacttcatatccctttggcgaagcgatcgagatatcacagcccattttcgcgcagccgatcatcaaggagtgcgccacgttatttccgtcaccgatgtatgagacttttacgcctttaagcttcccttttatctccttaatcgtcaagagatccgccagcgcctggcatgggtggtatttatcagtaagtccattgatcaccggaatgtcagcttctttggcaagttcctccaccttttcatgttcaaaggtccggatcatgatggcatccacatagcctgacagcacttttgccgtatcagcgacagtctcaccgcgccccagctgcagatctttctggcttagaaagagggcgttcccgccaagctgtgccatgcccgcttcaaaagaaacacgtgtccgcgttgatgatttttcaaaaatcatcgccaaggttttgccatggaatataggctgaattttgttttgtttcagctcaccggcttctgcgagcaaggcgtttatatcctcttcactaaggtcctttaacgttaataaatcttttccgtataaactggtttgcgtcactgtgtgcatgatgccacttcctttttatagaggtctttgagagatacaggctgcggatggccagaaccgctttgtaaaaacgcccgcacagtttcttcttctgtaaagacggggatgccgtgcgtcatggcttccaaacgttctatgcgtgcttcttcagaaccgctcagattgatgtggagcgatttttcttcttgttccatccatgaggcaaatgtcccttcatgaacggtaaaacctgcgttttctgctaactcctgcacatcttccggaacgttttgcaaataaatgcttcctttttgactccagactcttgtatagatttttttcaaggcgctgttagaatcatatgcgacacacatgccttctcccgttgatttcatttccggcccaagcttgatatccacatcctggatcgcatgagaagaaaaaacagggaacttcacggcaactccatgatgattttgaactgccggatctagatcttttaaggacgctcccgccagcagacgtgtggcgagcggaatcatcggaacgcccattactttgctgacgacaggaaccgtgcggctcgctctcggattcacttcaagaacgagtatgtttccattgtcgatcacaaattgaatgttcatgatgcctttaaatgaaagttttcgggcaattttttgtgccgcatctttcatgccctgctgcagcccgctcgtgatggacggcccgggaagaatggcaaagctgtcccctgaatggacacctgcccgttcaatatgctcggtatatgtcgggataaagacatcctcgccgtcggaaatcaaatcaatttcgacttcctttccagacacatattgatcaatcaaaatcggatatggcatgctgtcctcatcattcagcagctgagaaagctgggcttgcgagtcaacaatgatcatgcccattccgccgataacgtaagatgggcggattaacaccggatagccgatctcactcgcttttgaagcggcttcttcttttgtataagcaatttctccttttgcgtgcttcaatcccagctcgtcaagaagctgatagaattgatcccgatcctctaacacgtcgagcgtttgaaatgatgtgccaagaagagtaatgccggctttttcgagcgcttcagcagcattgattgcagtttggccgccgaattgcacaattgcaaaatcaatattttcctgctccgccacgtttacaatatgctccgttgtcattggttcaaaatacaggcggtccgcaatttcataatcggtgctgaccgtttccgggttattgttaatcatgatggtttcgaatccaagctcttgcagtgtcagcacaccgtgaacagcactataatcaaattcaacgccttggccgatccgaatcgggcctgatccgataatgagcgcgcgttttttctctttgcggctgatgtctccatcggtttctccgaaatatgtggagtaaaaatagtttgttttcgcatcaaactctgccgcgcatgtatctacgattttaaaggaaggcgtaatgcccatctccttgcgaagcgcgcgcacctcttcctctgttttgccgatcagtgaggcaatcgttgcgtctgagaatcccttttcctttgctttcttcaataattcaaaagagagatcgctccctgcttccatcaggcggttttccaatttgatgatgttgtcaaaggtatgaaggaaaaacggatcaatttttgttttttcatggatgtcatcaatcgagacgctgcggctcaacagctccatgacaacgaaaaatctgcggtcatccggagtgattgccaaatcccatagcgtatcaattgacaacccgctgagctctggaaggtgtgtcccgatattttttaattcaagcgacgcggctgccttttgtatcgctgcttctaaattccgttcaatcgccatcacttcaccggtggctttcatttttgtgccaagcttgcggtctgcgtttttgaatttatcaaacggccagcgcggaaatttgacgatcacatagtccagtgccggttcaaagcttgcgtaagttgagcctgtgagcggatttttcagctcgtcaagtgtgtatccgactgccagtttagcagccatctttgcaatcggataaccggtcgctttagatgcgagagccgatgaccggctgacacgcggattcacttcgatcacgtaatattgcttgctgaaaggatcaagcgcgaattgaatattgcagccgcctacgacatcaagtgctgaaatgatggtcagactagccgtccgcagcatttgatagtcttcatctgtcaatgtttgtgaaggcgccacaacgatagagtcacctgtatgcacgccgaccggatcgatattttccatgttgcagacggtaatgcatgtgttattgctgtcacgcatgacttcatattcaatctctttaaagcctgcaatgcttttttcgacaaggcattgattgatcgggcttgctaatagcgcctgtttaatcatagctgtaaaggcttctttatcaggggcgattcctccgccctttccgcctaatgtgtaagcaggtctgataataacgggaaaaccgatggattccgcaaaccggatggcgtcggtttcattatcaacaatttcactctctggcacgggctgattcaattcgttcattaacgaacggaatttttcccggtcttctcctttttgtatcgtttcaacggatgtgccgagaagcttgacgccgtgctcctttaaaacacccgtttcttcaagctccactgctaaattcaacgcggtctgaccgcctaaattggcaagaagcccatcaggctgttctttcttaatgatggctgtcaggctttctgctgtcagaggctcaaaataaatctcatcagcaaaggcttcatcggtcataattgtcgccggattgctgttgacgagaatcacccggtagccctcctccttcagcgcgatgcacccttgagttcctgaataatcaaattctgccgcctgcccgatgatgatcgggcctgatccgattactaatatgcttgaaatactggtgtctttaggcatgcgcgatttctctccttgctggtatcacattctttagataatcatcaaaaacccattcgctttccgccggtccgggatgggcttccgggtggaattgcacactcatgactggcagttttttatgggcaagcccttcaactgacgtatcattgacatgatgaaatctgatcgtgagctcttcttcattaatcgactgttcatcaaccacatagctgtggttttggcttgtcataaagacccgtttcgtctcacggtcgatgaccggatgattagctcccctgtgtccgaatggcagcttaaaagtattccctccgaacgcgagcgcgatcagctgatgtccgagacaaatgccgagagtcggaaagcggctgatgatgcttttgatctttcctaaatatggctggattgctttcggatctccaggtccgttcgatagcacaatgccatcgggtttgatgttgtatacggcctccatttgctggtatggcaccacagtaaccttgcagcctcttttgacaagtgatgatgcgattgactttttatagccaaaatcaatgagagcgatatgtttattcccgtcgccgaatgtgctgatttcctgggctgaagcctgctctgccacattctctggttgaagggccatctcagctccttctttagaggctgtgactgttgcacccatcgtcccgtttgcccggattttcttcacgacagccctcgtatcaacatgggttaacagtggaatgttccatttctgtaaatactccttgaggctgtataccgcttcataatgagaaaagtgatcacacgcctcatagacaaccgctgcttttacttgcggtttcttgctttcaaagtccttttcatttatgccgtagttgccaatcagcgggtaggtaaatacaataatctgtcccttatacgatggatctgtcagcacttcctggtagcctgtcattcctgtgaaaaaaacagcttctcccgtacagttttcatggccgtccagctcgccgctgaacgatgtcccatcttctaacactaaataaccttccatctaacagcccacctcttgatgaataattaattataaaaatgaatttttatgcctttatatcgaaaaaaaatcactggtttacagcggaatgatgagcgattgcctgtttcagcttgctgacggcttctgctatttcatccttagtcacggtgagcggcggcagcagccgaatcacgttcgggccggccggcaatacaagcaagcctaatgtctgcaattcagcaataatgtcagcaaccgggccatcacactcaattccaagcattaatcctttacctcggatttgtttaacaaaagggctctttagctctgcctcaagctgttcttttaaaaacgcccctttgtcagcagcctcttgcaaaaagtcaggctggaatacaatttgcaatgtggcattcacagcagccatcgccagcatgtttcctccgaaagttgttccgtgagaaccaggggtaaacgcttctccaagctgtttttttccgatgacagcgccgaccggaaagccgtttcccaatcctttggcgactgtgatgatatccggtgagagtccgaagtgctcatatgcgaagccttttcccgtccgtccgatgccggtctggatttcatcaatgatgagaagggcttgcttttccttgcaaaacgactgtacggctgataaaaattcagcactcgccggattgactcctccttctccctgcactgtttcaagcatcaccgcggcaatatcgccttcctccccaagagctttaaaagcagaaggatcattgtatggcaggtagtgaaagccttcaagcatcgggccgaagcctgttttgattttatcctgtccggtcgcagccatccctgcatacgtgcggccatggaacgactgaagaaaagtgatgatttttgtttttccagttgcttttcgggcaagctttatcgcaccttcattcgcctctgcgccgctgttgcagaaaaagacaagatctcctgcactatgcgctgccagcttctgcgccgcttgctcttggagactgttttgaaacaggttagatacgtgccatacgctgtcaagctgttttttgactgcctctgtcaccgcttcatggcagtgtcctagatttgataccgcaatcccctgaatgaaatcaaggtatgatttgccgttttgatcctcaacgtacgttccctttgcttttttgaggtcaatatcccaacggccgtaggtttgaaacaagctgctcatgaaacagcctcctttgctttgacgatttttgtcccctgaaaggtttgttctgcgaagaatgatccttttccgtttacgatcatgacttcagacacctgatctgataaagctgacaaggctgaattgaccttcgggatcatccctcctgtgatcacttcctgcttgatcagcatctgaatctccttaggggtcaggacgtccagacgctgcttttccttcatgattccatcgacatccgtgacgaacatcagcttatcagcttcaagcgctccggcgactgctgaagcagccagatcagcatttacattcagcgttttgcagtcgcttgtcatagacagcggcgcaataactgggatgatgccattttccatcagcgcgttcaccatggacgcatcgacttttttgatttctcccacttctccgtgtgtttctggatctagataatcagcctccaaaagacctccatccttaccagaaatgcctgcggctcgcagtccgtgtttggcaagctcagcaacgaaaaatttattgacagaaccggataaaaccatttccgccacttccagcaccggcttcgttgttttcctctgtccgcccgaaaactctgtcttgatatttaaccgtttcagcatattcgtgatttccggtcccccgccatgtacgatcgccagcttccagcctgacgccatcagctctttcagattttgaaaaaattcctccgacagctcacggatgacgcttcccccgcatttaaaaacgattgttttcttcatttcgctcccctttattacgtgcgatagctcgcgttaattttgatatagtcataggtcaggtcacagccccacgctctcccgtttccgtccccttcatccatcttgatgacaatggtgatttcatctccttcaaggtattccttggcgagagattcagagaatggctgaggctcgttattcttaaacaggcattggccgccaagataaacctctacttcttctgccgtcacttgagctgcggagtgtccaatggctccgatgatccgcccccagttggcatctgttccgtatactgccgttttcacgagatttgagccgacaatctttttggcaatgacgtttgcatcaagattgtttttcgctccctgtacttgtgcttcaattagttttgtcgcgccttctccgtctctggcaatctctttagccagatcctcacaagtgagcaagagtgcttttttaaagaccggccagtctggatggtcttctgtcaggcactcgttttcggcgcagccattcgccataactaataccatatcgttcgtggatgtttctccgtcaactgtgatttggttaaatgaaacgtcagtgatttctcgaagcgccttttgcagcgctttttcttcgattgccgcgtcagttgtcacaaatcccagcatcgtggccatgttcgggtgtatcatccctgagcctttggccgctccgccgatcgtgactgttttgccgccgattgccagttcatagcacgtctgcttgatcaccgtatcagttgttaaaattgcttcctcaaaatcgcctgatcccgcaggtgttcctttcagcagctcgatccccgcgtggattttttccatgtctaaatgctcgccgatgacacccgttgatgaaacagcgacaagctccggctcaatgccaagctgtgaagcaaagctctcccgcattgtgtatgcgtcctttaggccttgttctcccgtgcaggcattggcaatggcactgttgacgataacggctttcagtgtcggtccgtgctttaagctgtcttgtgtcactttgatcggagcagcctgaaagtggctttgggtataaactgctgcgctcacagccagtgtctcgctgataatgacgccgaggtcttttttcgagtagcgcagcccgcaatgcacaccctttgcctgaaacccttttggcgaggatacatcacctgttacttttacaatttgatcttcacttaactgaatcatggttcgattctctcccgttctatggataaattggcgtgatggtgagtccagtttcttcattccagccattcatcaaattaaagttttgcactgcctgaccggcggcacccttcattaaattatcgattaccgagacgatcgtgactctgttcgttctctcatcgagggtcacggcgatatcacagaaattgctgccgtacacttctttcgtttgcgggtactgaccttttggcctcactctcacaaaatatgaatcttggtaaaattccgaatataaatcatgcaggtcatctgctgatagatcacaggttaatctggtatacatcgtcgccatgatgccccttgtcatcggaaccaagtgagccgaaaatgtaatgggcccgaggcctggctgccattcattcagcgcctgctcaatttccggcgtgtgctgatgttcattgactttgtaaattttaaaattgtcgttcagctcagaaaaatgggttcccatggatgcttttcttcccgctccggaaacacccgtcttcgcgtcaacgataacgaaagattcatcgagcagtttcttttgagccaatggtgcgaggccaagcaaaacagctgttggaaaacagcctggattggcaatgagtttcgcctgttgaatttgctgttgattcagttctgccagaccgtataccgcctcttgaatcaccgccttcggtgccgctgtccgtttataccatttttcatattcagccggttcttgtatcctcagatcacctgacagatcaataaccggaattcccgcgtctgccagctttggagtcaattcacttgatactccgggcggcgcagcgagaaacatgatatctatttcgtgtttgatcgtattcatatcaatcggcttcagctgctgatccgctaagccggtaagatgaggataaccctcgctatagacattcccttctccgctggatgaataaagtatgcattcctctgcatgaggatgatgcgaaagaatcctgacaagttcggtgcctccatatcctgtagcacctacaattcctattttcaaaacaagttcaccctcttggtctttgtgaaattatttaacattataacatgaataaaaattaattcaatcgtatatttaatatttttattcatttataaattttctgttcaatggaaattccgctcaaaaaaatcggcacgacgccatcataaaaacgttgatgcggcgccgcatttcagccgcataaaaaaacaggctgaccgcgtcagcctgttttcatcatcatcaatccactcaaaaaatatagaatagagcttgcataaaaaatcatttgcactgtaaaaaagtcagcgagaaagcccccgagcataatggctgctgctgaaaagacagctgtccaaaaatggtaatttccaatcttctttccacgctctccgctgtctgtaaaattagcgatcagcacttttttctccatgcttttgcatcgctccaaagagccctaacagcacttggacgatatacacttgaacgacgcttccaatatgcgggacatataaaagcagaacagccatcccccacgagttcagaagcagaaaataacggctgtcaaacctttcagacagccgtccgaggagcgggtaaatgagcgctccgctcaacccgaacaatccgtaggaaaaaccgaactgtgtgtagcttgagccgatatttttcacaaacagaatataaaacggaaagattaagctgcttgcgaaaaacacgctgctttgtgataatgtcagccattttaatttgtttttccccattatttatacctctgataaaagtaattcataaagcgctcatccgggtcataggttcgttttttctgaaaaaacgcttcacttttcggatatgcctgtctcatttgcgcttttgtctggtaggtcatataaggcagataatagctgccgccgtgcttgatggcaacgtctgtcatgtgcctgatgattcgggcagtatctgcctggtcttcttttgaaaagccctcgtttattaatagcacgagcgaaaacatatcgtccttcgcataggaaaggtcggccttttcatttttctgcacgtagcggatcgtaatgttcagcaggttcagatcttcgtccgacagcgtttgtctcaggtcatcaatataggacccatactccttcacgggcacaaagtattcttgcaaaacatctgtgttgtcattgttttcatactcaagaaactttgattcggaccgcatgacgttattgcgtgaaatctctgtgccgttttggctcaggaaataggattgctgtgtgtcccacagccaattcctgccccattcataccgtcttgacaaaccgagtgcaaactttgtggctcccgtatactcatcttctttgagatcgctgtatgatggcagttgatcctgatgatcagccaatacgtaattcgtgacatacatgtctttcagaaatccttttttcgctgttgaaattcgcgccagatgcattcggacatctggatttccttttacatgctttgaaaaatagtctgagtatgtgctgtaattcattttttctgtcttcatgacatacagctcatcatctgtcagctcaagcgttacatcaagaatcacgccaaaaaggccgtaccctccgatgaccgccgtaaacaaatcatcttttggagtgacagtgataatcgtcccgtcagcttttaaaagccgaaatgatttgactgtatcaatcagcgagccgtagcgaatatcacgtccgtgtgcatttgcgctgagagatccgccgattgtaaaaatgttttgtgactgcatgacttttaccgcgagtccgtatggattcacgtatttctggatatcattccacgttgcaccgctttgcaccctgatggttttcttctcttgatcgagtgacaggattttgttgtagcccgtcatgtcgagaacgatgccgtcctcataatatgtatggccgcccatggagtgctgggccccggcgattgaaatttttatgttttttcgatttgcctctttgactgtgtcaatgagcgtttcctcttcctgccctttcactgtctgctttatttttacaggcatcaggcggctgacatccgtcatctcgcttgtagctgttttttgctctgagttcacagagtacgcaaacagggccgcatacgcgccagtacaaagcgcgaatgcaagcaatttctttttcatagtgctctccctgctgtttttatgaccattataccatgactgcgtcctcatttttccaaattatcttcttgcccgtttttcggcacggcggtcggcgacgataaagcaggcgtgaatcgcgcccggcagccaaaagatacaggtcaatatgagattcagcaaggcctgaaacggttttcccgaaaacaaaacagcaagcggcgggcacaaaactgccagcaggtacatcatttcctttcactcctttcagctgtaaaaaaggacagcctcacatgtcaggctgtcctcttttgttttattgaatgccaagcgcaatttttgcgtatctggacattttatccctagtccaaggcggattccatacaatgtgaacctctgtgtctttcacttcaggaaggtccgctaatgcttttttcacctcatccacgataatcggcgctaaagggcatcccattgatgtcagtgtcatcgtcacgtgcgttaagccgtcttcatccatgtcaacatcgtataccaaaccaaggttcacgatatcaacgccaagctcaggatcgacaacctgttccagggcgcccatgatgttttcttttaatgcttcttccacgttccctcactccttttttctacagtataacgtaaattcagctcttgttaataacttagtgctttataagtacgtttcaaaccattcaatcgtttttaacacagctgcccgcgggactttatggtcagcgttttcatctccgataaattgcaggcgttccggctgctcgctgtaatgggatttgatcgtgtcataaaaattccgggtcggcgcgtaaggcacaactttatcttttgcgccgtgccaaaataaaagcgggcgctgttgcagtttctccggctgaaggctgagatcccgcaattcgagacgtttcatcagctgctgtaccttctcttccggcacatcgatttcaatgccctgagattgaatatggtcaatctgctgctgaaacagctccacgtaattggggcttcccatcaggctgacgccggcttttatccaatcatatgcagtcaaagcgccaagcgttgtgatgccgcccattgacgtgcctgcgagaccgatgcggccgccgtctatcaggccctctttttcaaaatggtttttaagtatgccgatctcttcaatctcgttaaggacgatatcccaaaaatgccccgccagctcttcgacagccatttcttctccccgttccccatggtgcaaagcctccggcagaacggctctaaaacccttctccgcaagcagataagcaatatgaaggttgtgttccttcgcgcttgtaaaaccatgtataaagatcacgagaggaacagcgcggtgcctgttctcttcctttacaatatgtaaaaacggaataccggaaacggtttgattctcaatttgtatcacaatgtgcccctccttaggataaccataatcataagtgtaacatgtagacaataaagatggtaaaaagctacactgtaagtaaggcaaaacaagcaaaatctaaggttaaaggagcttttcatggagacaaaaccctatttaatcgcattagatttagatggaacattattaaaggatgataaaaccatatctgaaaacacccttcagacgatacagcgcctaaaagatgacgggcattatgtctgcatctcaacaggccgtccgtatcgttcaagttccatgtactaccagcagatggagctgacaacgccaattgtcaattttaacggagcatttgtccatcatccgcaagacgacagctggggacggtatcatacgtcactgccgcttgatgttgtcaaacagctcgtggatatcagcgagagctacaacgtacataacgtgcttgctgaagtgattgacgacgtatactttcattaccatgatgagcacctgatagatgcctttaacatgaacacaacaaatgtaacggtcggagacttgcgggaaaatctcggtgaagatgtgacgtccgtactcatacatgcaaaggaagaggatgtgccggcaatacgctcatatttatcggatgtgcatgccgaggtgatcgaccatagaagatgggccgctccgtggcatgtcattgaaattatcaaaagcggcatgaataaagcggtcggcctgcagaaaatcagcgattattacggcgtgcctagggagcggatcattgcttttggagatgaggataacgatttggaaatgcttgaatttgcaggctgcggcgttgcaatgggaaatggaattgacgcggtcaagcagattgccaaccgaactacggccacaaatgaagaggacggcgtggcaaggtttttgaaagaatatttctcactttaaagaaggtccgtattaatttttcccactcataaaccttactttaccccaccatactattgaagacgactcatctcgtcaaagtatggaagggggcagtctcaaaatgggtaaacgaagcaaatccagaaggtttattcagcagggtaaagactccatcgggctacacgccgcaagatttccatatcggtctactttagaagaagctcaccagcatgccgcggcacgagactcggctgaaaggcagtatgaatattaaatgagaaatgaactgtttcagcaggcaaaatcatttgttcaacaggcggtcatggtgacaaacggctttgaggaaggcgatcaggagcaagcgattctgagagccaaaaatgctgtatcttctgcgtatgccaattcgacagatgcggaacgtcaacagttgcatcaatttcaaaatcagctggacaaactgcaataaaaaaaggctatggcgactcgccatagcctcttatttgacttcaaactgctgaacagcctgaacctgcttgagattttccgccctgcccttaaatgtcaccttgacctcataggttccgggctcagggacttccttccacacatcagagaaatcatatgtttctccagattcaagcgtcaggttttgaaaagcctgcgtaaacattttgtctttcgaataacggtatctttctttgtgctcagaatcatacacgacaagttcaaatttttgccctgtgctgaattgaaactcaatagcacgttcgctttggttcttcagcgacatgttaaacttgatttgttcaggctcctgaattgcgtcaatagataaaacaacctcttgattctccattccgcctgatacctccttatcgggttctgtctgctcatctttcccgcagcctatcaaaagcagcacggggaggagcatcacaagcagccgtttcacgacttccacctgctttcgtcagtcttttctaaagaaaccaaaaatccctgtcgtttgaacgatgttcgtaaatgcttttggatcaacttctttgacgatcttttctaaatcgtacagttcatacctcgtgatgacgataatcatcatttctttctgttcgttcgtaaaagctccttttgccggaacagttgtgatgccgcgcaccatttttccgtaaatggcttccttgatttcgtccgcttttttcgtcacaatcattgccgtaagcttcatgtggcgagtgtgaatggcgtcgatcaccctcgttgtcacatatagtgtaaccagggtatataatgctttctcccaaccttgcaataatcctgccgtcaagatgataatcccgttcagaatgaagaaatacgtgccgacgggtttatccttccactttgcaagtaccatggcgacgatatcaagcccgcctgtcgaagctccgtattttaatgttaagccgataccgactgcggaaatgacgccgccgaacaccgcgttcagcaaaatgtcatgtgacaggcttgtttccggcaggatccccataaacagagtagtgagtgcgacacttaaaatgctgtacactgtaaacgatttgccgaccttcagccatcctaaaataccgaccggaatgtttaagaggaacaagagcgttcccgtcgatatgtaaaagggggcatattgatcaacgacgcttgataaaagctgggcaacacctgtaaatccgctggcatatacatctgcaggtattaaaaataagttcagcccggcagcattgagtaaagcgccgatgatgacgatgagtaatttttttgtttgatctagtaccatggcatgttcctccgctctttcttctttattatgttttcccttaaaacaaatatttgaacacgattttggcaaattaatatgatatagttggcttaactctcatgataacgagcgataacggaaagaagggaagcaatatgacagttcatctcatcgctgacagcgccactgatttgcctcgttcttattttgaagaaaaaggcattggctttattccgctcagggtttctctcggcgataaagaattcgaagatgcagtcacaattcatgcggatcaaatatttgaagcgatgcaaaatggagaaacgcctaagacgtcccaagcctcaccgcaaacgattaaaaatgtgtttttgcaatatgccgaaacaggtgatcccgctctttacattgccttttcctcaggtctctccggcacgtatcagacagctgtaatgatcgccaatgaagtgaaggaggaattccccgatttcgatttgcgggtcattgattccaaatgcgcttcattaggatacggtctggctgtccggcatgctgccgatctctgtatcaacgggaatacaatacaagaaattgaaacgtctgtaaagaacttttgcagccagcttgatcacatttttaccgttgatgatttaacatatctcgcgaggggcggccggatatccaaaacgtccgcttttgtcggcggcctgttgaatattaaaccgctgcttcagatggaggacggcaagcttgtgcctctggaaaaaattcgcggacagaagaaacttttcaaacggatcatcgagcttatgaaagagcgcggggatgattggagcaatcaaaccgtcgggattagctacgccgcgaacaaagaaaaagccacggatatgaaacacctgattgaggaagcgttcaagccgaaagaaatcattatgcatccaatcagttcagccatcggctcgcatgccggtccaggtacattggcgatattctttttaagaaaatgagcaaacaaaaacagtcagactctgtgtcctgactgtttttgtttgctcatagaatgccgacagcctcatacgccttttcgactgaagctgattgcttcgagccttcaccgtataaatcattggcagcttcaatcgccgcttgcttcatcatgctgaaatctgtagatgccgttacataatatgttaaagcccgatagtaaatttgttcacttgcttcacgcccaatcccttcaacctgtacaccgtggtgcacgcctccttctgcaagaagataagctgctttattgtgaatggacgaattgatatggactccgccataatcctctgttcctgtgtagcggttcgagtaatgatctggatttccctgcttagatgggtcctccaatgaccgcaatgaatctcctgcaataccaggagtatagacatcttcgccgatctcccaatcatcacggtcagccatcgcgcccataatgtcagaaatggactcatttaatgcaccgggttctccttgatataaaagaccggcggaatactgtgtgactgcgtgtgtgatttcatgcgcgacaatgtcgagcgatccagacagcggcttaaatttcgaaccgtctccatccccgtataccatctggacaccgttccacgcagcattgttccattgtttgccgacatgcacggtagacgtaatccttgctccgttttgatcaaaagaatcacggccaaatgtcttgctgtaataatcgtaaacggcttgcgcatttgcgtgtgcgtctacagccgcaggttcattaaatacggacgtgctgctgactatttctttgcccgtatacccgatcagttgagacaaaagcgtaaacaaggtttcgttcaggttcttcgcgtcaaatgtattgatcccttttccccttgtttcgtcagccaaataaaagcgcccattttgttctctgacgtcaaagcttttttcatcacctgatacgccgattcctgtacctgccgtttcatgaatggcattaaaggactcaatgacctttccgtttttggcatcgatgaaataatgccaatagccaggctcaggttcagatgtcgagagtctcacaaggtaggcgagatcatattcaccgtcgtgtggatagatatataattcgccttttggttccccatcaagatattcgatttttccaatggaagcctcgagctcacgccttgctgcatgtattgcttttttctcagaaatagacggtgtgatggagacgtccttgatttgcggatgcacctttccaaagaaacttttcacttgtttgttttccttcatcgcgaccgcttgttcaaagccgtaaatcggaattcctttgtaaacctccgttaatttaaaaaacgtttgttttgtctttggatcctttatggttttcgaaacacgaaaatggctgttcgcattccctttgagcttaaactgcgtttgatgcttgtcaagataggaaaatagcgattctttctgggttgtgttttgtaccggcttctgcggtgacttttcgatgatgtatgaaggggtttgatacgtatggtcgtatttgatgctttgatcagctgaggcatgtgttacaaaaaccatttgggccgctgtgcataagccggccagtaatagagatgtcttggtcaagttgcgcaaaacaccacatccttcctattttggaatctaccatttttcttcatcctatcaaaaatacaaaaacttgtatgtggtgcttcgttcttattttcccaaaaaagaagggcagagatatttcgctctgcccttctttttctactctactaattttttattgacataaataataacccctgctccatatgccagtataagcggaggtatgagctgctcctgaccttgaaatgagataaaactattcagcaaaatgaacaaaccggaattcaagaaaaagtagcctgctattctggccagccgatctttatcccgtatacgcgcctcgttaaacccagccaacatccaggtttgttttttgattccgacaaaataggcaaccacaaagaataaaagcgcgatgacaattaatagataattgatgctgatttccatcttacagcctcctacaagattacttgatgttaagaaaaagaaaaaaagcggcgcagcttactgcaatcagcagcaggacgacaagcgcattgaggaacgggctcaaaaggagcaccactgctaaaaacagcagataaaccgcaccgactcgcgaaatcttgacaatctccttttgagagcgcattttgttttttctgacacctgcaaacatcaccaattttttccgcttccatacatatccggcgagcaccattaaataaacagccagcggcagatgtctgaagtcggacggcagcagcggcagggcgataatcgtgacaatgagaaggaccgaaatccagcttttgcccaataaagacctcctccttttcgtctctcccccatcacccatcatcaattcggcaagctccttcggatgagaaaattcagattcaacagcttcctgcagttcctcttcactaaggccggctttgattctgtcttgaacgaaagcggtgatatgcccctttaattcgtcgatagcgttttctctctctacatcaggcatattcgccagctctgcatttagttcctccatgtatcggtcaatgataagctgtccattcatagcaaatcccccgataaagacagtaaggcttgatgggtttccaggtatttctccagccgttcttttaacatttcttctcctttttgcgtcattttgtaatactttcttttcgggccgtccagtgaatcttcccaaaaaaattcgatccatcccttctcggtcatacgtttcaaaatcggataaatcgctccctctgaaatagccagcgccgaggtggtttttaaggatgacgtcagctcataaccgtacatcggtttagaacgcagaagggataggatggccagctcgaaaatcccttttcgaaattgaacaatccagcggtcattaacttgattcgttttcatggtttaaatatatcgaaaaaaacactatatatcaatcacatatagcagtgtaaaatgtcctgttttttcttttaacaaaaatggaatttcccatactttttaacctttttattacataaatgtttttatattatgaaaagtgtaaaaacgattcttcaggttaaaaggagcagtcgaatgcagaaatcgatatcattttttgtcattttttcaatcctttggggttcgctatttctgttttctattattggcagcttagggacaaccccaattccgctgacaaaggactccaaatttctcatgtccagcatcctccctcagggctggggctttttcagcaaaaatccgcgtgatactgcaatcggcttatatgaggctgaaaatgccagcgccaaggtcagatggcccaatatgagggctgacaacctattcggcctgtatcggtatgggcggtcacaaggcgttgaaatgggcgtgatctacagccaagtcggcaaggaacagtggacagcatgtaaagaaaaggacctcggcgcatgcaaaagcaaagccaaaaccgtgcaattaaaaacacccgctccccgcccgctgctttgtggcagctactatttgacgaaagaggatattgttccttggagctattctaaatacaccccttcgtcttatcaggtaaaaagcatagtcaaggttgtgatctcatgctcgaaaacataaaacagaccatcaccagatgggacgaaagaaacccgtggacaaatgtatacggcctcgcgcgaagcatcattgcgctatccagcctgctgacgctgctcatcaatcacccgagcctcattatgaagccagccagcgggatcagcagctatccagcttgtaaaatgaatctcagtctcttttgcctcggcgaaaataactatatgatgttaaatcttttcaggtgggtctgcattgtcattctggtgcttgttgtcattggctggcgccccagaatcaccggggttctgcattggtatgtcagttacagcctgcagtcatcgctgatcgtcatcgacggaggcgagcaggcagcagccgtcatgacctttttactgcttcccatcacgctgaccgatccgagaaaatggcattggagtacgagacctatagagggcaaaagaacacttggaaaaataacagcttttatttcttattttgtgatcagaatccaagtggcggtgctttattttcactctaccgtcgctaagctgtctcagcaggaatgggtggacggaacggccgtctattatttcgcccaggaaaaaaccattggcttcaacggcttttttcaggcgttaacgaagccaattgtaacaagtccgttcgtggtgattccgacatgggggacgctgctggttcaaattgtcatcttcgcggcgctgtttgcgccgaagaagcattggagattgattttgatcatcgctgtttttatgcatgagatttttgcagtcatgctgggcctcatcagtttttcgattatcatggccggcattttgatattgtatctcactcctatcgattccacgattcaatttacatatattcgcagactgttgtggaataaaaaacacaagaagggagaggtttcagtttgaagaaggcgtttctagtatttttgtcggttgtattggtgacgactgtgtttttggtgaagcagcaagaaagtgtggcacaggcaaagcagcttgagtattcaggtgaggaaatttttaaaggctttgtgtttgcccaaggggaagttggcaaacagcttccagaggtctttaataaagcgatgacagacaaactcaacacaaaacaggcaaaggcttttgccaatcaggttgtcgctgatattaaaaaagaggatgctgacttttttgataacctgaagaaagctgtttacagcaaagatgcattgaaagtggatgaactgctgaaaaaagcaggtcaaatcgttgaagaaaaagtagaagctgcaaaggaaatcgccgcttctaaggatgatacatccagagttcaggccgagcttgtcaacactgttgataccgctaactatttctattatgtttcttatgttgctgcagcaggtgccctgattctgatcattctcgccattgatattacgccgattgcgatttcagacaatgtggatcgcgaaatggcaatcagaacactggttgatgaattaaactagacataaaaaaacggctcgctccgcagtctgctgcaggcgagccgttttcatgctattttttctcgtatgtccatccattttcctgatacacttttccgtttttcatcaaatggcccagtgcgcgtttaaaggcggctttgctcatattaaaacgttctctgatatcgtcaggctggcttttgtcactgtacggcatggcaccgtttctcattctcatatacgttagaatgcactcagcatcaactgacattgcatcctgttttctcggaagcagcgacaagttgactgaaccgtcttctttcacttgaatcacccggcctgtgactcttgaacccagtcttggctcctcttttctttctgacgggtgaataaaacagcggataccgtcatccgtgatcacgaatgaacccgatgcgatcagcctgtacaccgtacctgtcagctctttattcatcagatcttctgaagcgtcggtaaacagttcgctgatgatatcttccggcgctggtttcgcaaacatgcgcccccggttcgtcaccttcagcatacagtaaagtttgtcccctttttgcggccagacatcttcgtacggcggcaaatgctcagttgcgactagtgcgtccttcgataaaccgacatcaacgaaaacgcccatatcttccactttatccaccacttcaacccagccatattcatccgcgctgatgaccggaattttcatcgtggccgcaagcctttcctgctggtcgacgtatataaagacttctacttcgtctctgtcctcgatatcctcagtcatttcactgttatgtaagagaatcgtatcttccccatcggttaaaaagtaaccgaagtctgtttggtgatctatactcaaggttaattgctgccctggtctcatgctatcgtccttcctgttccgcttattcctctgcggattttgttaacattttttccaatcatcacaaattgattctttgttctgttggaagtttctctttattctactataatcaacacataagttaaatgttatggaggttttcatatggcaaaagaaagctcatttgatattgtatccaaggtggaattgcctgaagtgcaaaacgcaatccaaatcgcactgaaggaaatcagtacccgatacgactttaaaggcagcaaaagcgacatttctttagataaagaggagctggtcctcgtttctgatgacgacttcaaattaagccagctgaaagatgtgctggtcagcaaattgattaaacgaaacgtaccgacaaaaaacattgagtacggcaaggttgaaaacgcgtcaggcggaacggtacgccagcgtgcaaagcttgttcaaggcattgacaaggacaacgcaaaaaaaatcaatacgatcatcaaaaactccggactgaaagtaaagtctcaggtgcaggatgatcaagtgcgtgtcaccggaaaaaacaaagatgacctgcagcagattatctcagctgtgcggggagcagacctaccaattgacgttcaatttataaatttcagataaattttctgattcctattgattattgtctttattttcggtaaatttggagaaagggaaaaacgccagatatcttttggcacttcctgacatgaaaatttcatatccgttcttatcaagagaagcagagggactggcccgacgaagcttcagcaaccggtgtaatggcgatcagccatgaccaaggtgctaaatccagcaagctcgaacagcttggaagataagaagagacaaaatcactgacaaagtcttcttcttaagaggactttttttatttctcttttttccttgctgatgtgaataaaggaggcagacaatgggacttttagaagatttgcaaagacaggtgttaatcggtgacggcgccatggggacgctcctctactcctatggtattgacaggtgttttgaggagcttaatatttcaaagccggaggaaattcagcgcatacataaagcgtacgttgaagcgggagccaacattattcaaacgaatacgtacggagccaactatattaaattatccagacacgggcttgaggatgacatcaaaaaaatgaatcaggaggccgtaaagatcgcgcgggcttcagcaggcgatgcatacgtgcttggaacgatgggcggcatacgcacatttaataaaaacgcatacagtcttgacgaaattaagcgcagcttccgcgagcagctgtatctgctgctgcatgaagagccggatggcttgctgttagaaacatattatgatttggaagaagcccgtgaagtgctgaaaatcgcgcgcaaagagactgatcttccgattatgctcaatgtctccatgcacgagcaaggcgtattgcaggacggaacgccgctttctgacgcattgcgctcgattgcggatctcggagctgatattgtcggcattaactgccgcctcggcccttatcacatgattgaagcgctaagcgaagtgccgatttttgatgacgtattcttatccgtttatccgaacagcagtcttccttcgcttgaagagggacggctcgtctatgaaacagacgacacgtattttcaaaacagcgcgtcagaattccgtaagcaaggtgcgcggattatcggcggctgctgcggcacaacgccgaatcacatcagggcgatggcggaagcggttggcgggctggctccgattacggaaaaagaagtcaaaacccgggcgaaagaattcatttctgttcatcacgagcgaaccgagcccggcctggatgagatcgcagcgaaaaaacgctctattatcgtagagctggacccgccgaaaaaactaagctttgacaaatttctgtccgctgctgctgaattaaaagaagcgggaatcgatgccctgacactcgccgacaattctttggcgaccccgcggatcagcaatgttgcctgcggcgcccttgtcaagcagcagctcgatatgcgttcccttgtccatattacgtgccgtgaccgtaacattatcggcttacagtcacatttaatgggccttgatacgttagggctgaatgacgtgcttgctattacaggtgacccttctaaaatcggggattttcctggggcgacgtctgtatatgatttaacatcttttgatttaatcaggctgatcaaacaattcaatgaaggtctgtctctgtctggaaaaccgctcggcaagaaaacgaatttctcagttgccgccgcatttaatcctaacgtccgccatctggataaagcggtaaaacggcttgagaaaaaaatagattgcggcgcagattattttgtttctcagcctgtctattccgagcagcagcttgtcgatatccataacgaaacaaaacatctgaagacgccgatctatatcggcatcatgccgctgacaagcagccggaatgccgaattcatccataatgaaattcccggcattaagctgtctgatacgattcgcgaaaaaatggcccatgccggtgaagataaagaaaagcaaaaggcggaaggccttgcaattgcacgctccctgctggatacggcatgcgagctgtttaacggcatctacttgataacgcctttcctcagatctgacttaaccgctgagctcacatcatatattcagcaaaaagatgagcagcgccaaaatatctttttgcattaatttccaaaagactgcctgatcgaatcgggcagtctttttcaacgagattcgtgttacgatatagaaaaacaatcatgaggaggaacattatgctcgaagtcaaaaccatttccgcggaagatacatatgaaatccggcatcgcattctgcgtccccatcaatccattgaacaatgcaaatatgaagaggatcatgcaaaaggctcctttcatctcggcgcgttttttgaaggaaagctgatcagcatcgcttctttttccccgcaaagtcagcctttattaacggaagcctctgcgtatcggctgagaggcatggcaacgctcgagggatatcgcgatcaaaaagctggaagcacgctgatcaaacacgcggagcacaaactggcggagagcggcgttcaggcggtatggtgcaacgcaagacaccatgtcaagggctactatgccaagcttggctggaaggaacttggcgaaccatttgacattcccggcattggcaatcatattgtcatgtacaaaacacttagaacaagcaggtgatcttatggacgtagtagatgaactgattaagcttcatgaagaacacgtttccggcttattgcggctttgcgggcaagccgggtggccggattatggcgaacaagagctgaaactgcttgttcagcagggacgctttttcggttatcaaaatgtcagcggtgatattatttcctgcatcggcttgtttttgtttggccgtcttacttctatcggccttgttatcgttgacaaggaatatcaacggctcggtcttggccggcgtatggtaaacgcctgtattacccaaacagatgaaaacaccgccatcagactttgcgccacaaaagaaggtttgccgctttatgaaaaagcaggttttcatacggcaggttcagtgcgaaagtacagctgtcacagttttcaaccttatacaaaaaagcttgatgctgaactgacatcctttagagaacaagactttcacgacttaaccgcggcggatctggctgcctttggcggagatcgatcaaaccttttgcagcagcttatttctgcttcatgcgaatgtatcatcgccagaaatcaggacggacagctcattggctacggactttctgtacagacaccggccaatttgaaattcggccccatcatcgctccatcatcagatgttgcagcacagataattaacaggctggcggccggcaaacaagggccgatgcgaatcgatatacccagtgaacacacgtctctgcatgacagcctgatagaaatgggatttcataaagatgatgaacctccgcttttgttctatcagaaaaaagcgcctattcaaaatggacacatatatgctttgatttcacaggctctcggttaaccctcttttttcccgaacaggtatcttctgttcggttttttgctgtctgatcgctgaataaacgaagccatcagggacattctaagcagaagaaaaggagtgtgctctgagatggaatcatcaaaacaaaataatggaatgacgattgtagcaatcggttcaatccctttaatattaaccctaggaaactcgatgcttattccgattttgccaaaaatgaaatctgaacttcatttatcacaatttcaagtcagtctcgtgatcacagtattttccttgattgcagcatttgcgattccgattgtcggttatctcgcagaccgattctcaaggaaagtcatcattattccctgcttaattttgtatggtgccggcggtttgttagccgggtttgcggcaggtttttttgacaatgcctatccttgggtcatggcaggacgagcgttacagggaatcggggcagccggaaccggcccaattgccatggcactgacgggagatctgtttaaaggcgcccaggagagcaaggtgctcggccttgttgaagcttcaaacggcatggggaaagtgctatcgccgatcattggctcgctgatcgccctgcttgtctggtatggcgcgttttttgcctttcctgtgttttgtatcatttcgatcgtactgacttggatttttattaaagaaaagaaaaaggaaaaagaaccgccaccaatcggaaaatatgcaaaagggctgttaagtgtctttaaacatgaaggcagatggctgtttaccgcttatttagccggtgcgacctgtttgtttactttattcggcatcctgttttatctctcagatgttcttgaaaaaacatacgataccgacggcgtgaaaaaaggcttgattttagcgatcccgcttttggttatgtgtgtgacgtcctatacaacaggaagcaaaatcgggcaaaagcaatcgttaatgaaaaagctgatcgtacttggattggcgttcatgaccgtatcctacgcggcactgtcattcattgaaaatcttgtcctttttatcagtgttcttgtactgagcagtataggctcaggtcttgtccttccttgtgtgaacagttttattaccggggctgtcggcaaagaaagacggggatttgtcacctcgctgtacggctctgtacgtttcttaggggtagcgatcggtcctccgattttcggccgcctgatgcaatggtccagacccggcatgtttttaagcatcgcgggattgactctcgttgtcgggattcttgtgatgatgctcatccatgtgaagcaaaacaatgaagaaacaaaagaaaaagaagaccctaaaatggctggcaatcggctccagcccgctgaggaaaggtagcacccagtgtgaaaattgtacggattgaaacctttccgctatttcaccgattagaaaagccatacggagatgccaatgggtttaaacgatatcggacttgttatctcatcaggattatcaccgaaagcgggatagacggctggggagaatgcgttgattggctccctgctctccatgtcggttttacgaagcggatcatcccatttctattaggaaaacaggccggcagccgcctgtcattagtgcgcacgattcaaaaatggcaccagcgggcggcctccgctgtaagcatggcgctgacagagattgcagccaaagctgccgattgttcggtttgcgaattatggggcgggcgatacagagaggagattcctgtgtacgcgtcttttcaatcgtactcagactccccgcaatggatcagccgctcagtctccaatgttgaagcccagttgaaaaaagggtttgagcaaatcaaagtcaaaattggcgggacttcattcaaggaggatgtccggcacatcaatgcgctgcagcatacagcaggcagctccattacgatgattctggacgcaaaccaaagctacgatgccgctgcggcttttaaatgggagcgttatttctccgaatggacgaacattggctggcttgaggagcctttgccctttgatcagccgcaggattacgctatgcttcgaagccgtttgtctgttcctgttgccggcggagaaaacatgaaaggcccggcgcaatatgtgcctctcctttcacagcgctgtttggatatcattcagcccgatgtcatgcatgtcaacggaattgatgagtttcgggactgcctccagctcgcgcgttatttcggcgtcagagcatccgcccatgcatatgacggatcgctctcacggctctatgctttatttgcacaagcctgtctgcccccatggtctaaaatgaagaacgatcacattgaaccgatcgagtgggacgtcatggagaatccttttacagatctcgtcagcctgcagccttcaaaaggaatggtccacatcccgaaaggaaaaggcattggcacagagatcaatatggagatcgtcaatcgctacaagtgggatggctcagcctattaagctgggccatttctttattttgagacataaataatggacagcctcataaaatgaaaacagcggacaagtcttttcataaaggagcaaatgacttaatggctgaactgctgatgaaagcaaaacttacgtttatgattgtcgtaggcggcgtactacagggactcggcatgtccttgtttttatttccgcatgatattccgacaggcggtgcagcaggtattgcggtgctattgcattatctgtttcaaatcccccacggattttcagtgtgggctgtgaatgtatcaatgctttttaccgctttaaaatggctggagatgagaacattcaccggcaccctcgcttctatcaccgtcacctctgtctcggtattgatctttgatgcagtttttcctgatatcacatctaacctgtggcttgatctggcaagcggcgcagtgttattgggactcggaatcggacttttatacaaatataaaatttcgaacggaggattcggagcccttgctctgatgatttctatctaccgcggcgggaatcccggaacgatcctgctcatcatgaattgcatcatttttatggtcaccgcgtctattattgactggggcatcgtcattcaagccctcatatgccaggtgatatcgacaagagtcatcgacttcatctacaacatccgcctgacctcacttccctatctcacgcctatgtaccgccataaaaaataataggcagaggctctcttcacgacgagagccccgcagccgctgttttacagaaaaaaggtatcggatcttagccctaaacgcagcgtttccaacgcgatggcatcatgaaatggaatattggccagattcacattcggcccgattttttgaataaacccttgctgaagcgttttgttaggcgcttcaaaaatcagcctgttgatatcaatatccgaggaaatgatgtcgtcaacaatttgaaatctgacatcgccgctgctggaacagattcctcccgttccgctttctctggcttctgtaatcactttttccgcgcccgcttccatatcctcaacgatatattcaagccattcctcagagctttgccggcttgctaattccgcatccttgctgcccacctcactgagcacaagaaattcatcagaaaaatcagcaatgtaagccgctttctctttatttgtcatcgggagcgtaccgtttgaaatctcaatatattcacagccgaaataggtgcagtaccgatgaaattcattcacttttttctggcttacgtacttctcaaacagtgtgccgccaaagaaaaatgtaatgtcatgttctttcagtgtgctgattttttcttcaagatctttcgtaagtaatgaggtgccccagccgaatttcacaaaatcaatatagtcggacgctccggctatgacatctttgaaaaattgcaagggatagccgttatcaattaaaatggactgtccggtttctctcggcttgtttgttctcactggcaattctagtgaaaaatcattcatattatgaccctctctatcgttggaacttctccatcttgtttcactttcatcacgaaatcgcccgtcagttcttttgtacagtaaacgatgtcttccggatcaaacaatggctggcggctgtcaaaaaacttctccgcaacagaagagcgttttattctttcaatcgcctccgcagccgttaccgcatttgtcccttcaatgatgcctttgatatactccgcacacgccatatcgtcatcacctgatgggtgggaagccacaatgtttatgacacaatcgtttgcggcgagctttttcacatgctctgccgttgttttggcattggaaaatccagttacgaacagatgctttgcgttcagcgcccccaatgctgctgtgacgccgtttgttgttttctggatcaggcgcttatccgccatatcctgtcccgccatgcgttttggagaattatctaaatcaaatccgctgataccgacccccttttcctctcccgtcaaaacataatccggataggtgtctttcagcgcaaaggcttcatcagctgtccggaccaacaaaatctctttcgccccgccgataaacgcataatgggtgaccgtaaaggctctgatgacatcaatgacgatgttaatgtccgccggggcaagcgaatgatgatgcccctgataaatggcaatcggcatactacctctccttgggcataaaaccattttgctaaaaagcatattcagccgggctcttaatggttccgcacctcattttaggcgggcgcagcccctaaaaaccctgaacctttatgcaaaaaatgaatagtctgcctataactcgatcaatagataaaaaagcagatgcaaacggggggaaaacattgaacgaaaccatcacatatgacacatggaacgacatgctgtccaaacagataacggatcaattgatcgatgagctcgatgtgttgaaatgggcttaccgaacgtacggagaaaagattgtgtacgcatgcagctttggcgcagaagggatggtgcttctcgacttaatatcaaaaatcaacaaaaatgcacacatcatctttttggataccgggcttcattttcaggaaacatatgagctgatcgagaccgtcaaagaacgatatccgggatttgcaatccagatgctcgaacccgagctgagcttaacagaacaggggacgaagtacggcggagagctgtggaagcataacccgaacctctgctgccaattgcggaaaatcgaaccgctcaaaaagcacctgtccggcatgacagcttggatttcaggactgcgccgggatcagtcaccaacgagaaagcatattcaatacgtaaacctggaccagaagtttgagctcatcaaaatttgcccgctcatccactggacatgggatgacgtttggacgtacatccgcctgcacaatttgccttataacaaactgcacgatcaacattacccgagcataggctgtgaaatgtgtacattgccttccccggacccgaacgatgagagggctggaagatgggccggacgggagaaaacagaatgcggcctgcatcaagaataacggacggcaggttcttgatgtgagaatcgaaatgatgttaaggcgctgatgtcaaactttcattaagtgcagaaaagaaaacaaggaaacgtataaatggaggttgaacacgttgaatggaaacgaaccccacggaggggtattaatcaaccgctgtgatcccgcatgccattttgaagggtgcgcgtgccaagcagagctggatcagcttgcactgagtgatctggagcttattgcgatcggcggctacagcccgttaacaggttttttgggagaaaaagattatcattccgttgtgaaagagatgaggctggcaaacggcttgccgtggagcctgccgattacgctgcctgtcggagaaaaaacagcaaaacagctgtctgccggagatcacgtcaagcttgtgaaagacggtgtaacctacggcatgatcacagtcaccgatatataccagcctgataaaacacaagaagcactgtctgtctttaaaacaaacgatcctgcccacccaggcgtaaaaaaattgctggcgcgcccggattactatatcggagggcctatcacggtcagccgcctgcctgacaaatctttcgaacatttttatgcaacgcccgctgaaacaagagcggcctttcaaaaactcggctggaagacgattgtcggctttcaaaccaggaaccctgttcacagagcgcatgaatacattcaaaaaacagcgttagaaacggtcgacggtctgctgcttcacccgcttgtcggagaaacaaagtcagacgatatccccagcgatatcagaatggagagctaccaggctttgcttaatcactattatccaaaggatcgtgtcatgttatcagttttccctgccgccatgcgttatgcaggtccgcgggaagcgattttccatgcgctcgtccgaaaaaattacggctgcacccattttattgtaggccgtgatcacgcgggtgtcggcagctactatggaacatacgacgcccaaaatatttttcaatcattcacagaggaagagctgggcatcaagccgatgttttttgagcacagcttttattgccgaaaatgcggaaacatgggcacctccaaaacatgtccgcacagctcaagagaccacatccacttatcaggcacaaaagtgagagagcttctccgccaaggcaaaaagccgcctaaagaattcagccggcctgaggtcgcagccgtgctgatcaagggacttcaccaacagcctgttgccatcaaacaaaacagcggggaattgcaatgacacacaatccgaacatcatttggcatcccgctgccatctcaaagtctgacagacagtccttaaacggacacaaaagctgcgtcctttggtttacaggtttgtccggctccggaaaatcggtgctggccaatgcagtcgatgaaaagctttaccgcaagggcattcagagctacgtgctagacggtgataatatccgccacggcttaaacaaagatcttggatttcagactggtgacaggattgaaaacatacgccggatcggggaagtggcgaagctgtttgtcgacagcgggcaaatgattttaacggcttttatttctccattcagagaggatcgggacatggttagagcgctctttcctaaaggtgagttcttcgaaatttatgtgaagtgcccgctgcatgtttgtgaacagcgcgatccaaaagggctttataaaaaagcgcgaaacggagagatcaaacatttcaccgggatcgattctccgtatgaagcgccgctttcacccgatttcatcattgagtcagaccagacctctatttccgatggagctgatctcatcattaacgcactgcaaaacaggggaattatataaaaaacccgatcaatgtcgggttttttcttatgagttggagaactgcgcaatcaaactgttgatcttctctttttcctcataaaatgctccgtgcccgctgtttgcaaacggaaccaattccgactgtttgatgccgcgcttcaattctttcgcaaaatcaaacggcgcaattctatcctttctcccgtgcaggatcagcgtcggcaccttgattgcagcaagttcctttctgagatcttcgtctcttaatgcgatgcccgagtggatcgtcccgtaggaggaggcctccagcatcagattgagaaaccactgtctaagctctggagacacttttttctcaaaaaactgtttccctaaatcagccagtgttttgggccgatcagctttgaacaattcaatcatatcgtcaatatcctgcttcctcatcccgtacggataacccgggcgttttgtaaacgcgggggccgccgcagacagtaaaatcagcttatcaacatcggctccttcatgccttgccatataacggattgcaatggcgccgcccattgaaaaaccggcaagaatcgcattctcaagctgcagcgtataaatgactgctttcacatcatcggccatcgtgtcataatcgtagccttcccaagggcggtcagattgcccatatccccgtaaatcaacgccgataaaacgaaatccccttttcggaagctcattcatttgatattcaaacatcttatgattcaacggccacccgtgcaaaaagatgatcggccttccatgtccgatatcctctacaaacagtgtcacatgctcctcggttttgatgtaatgccccattccgcattcctcctgttccctttggctttttcggcctgtaaacgccttgacgtataggaagctttccatttatgcttacaaaacaagcgggctgctgtaccaagaaaaggctcttcacgatttactatatgtatcaatttccttaacgatctattaaattgaacccggaagcctctgtttttcgggcagcaaaggatgtcatcacatgaataaaatcgcaattcaaaaaccgaacataccggaaaacctgcaaaccgcagattttcatgatgccgtgacacaggatgatgtaatcagcatgcatttgtttgaagattgcaccatctgcggcgaagatatcgaaagactatgtgttgaaaaaacggtattcagaaatgtcgtctttatcgatgtgtcttttcggcatattgaactgaccgatgtgatctttgaaaaatgtgatttatcaaacgccgatttcagcggggctgtcattcacagaacttcagttaagcagtcaaaaatggttggaatgaatgtggcggaagcaacgctgcgaaatgtttcattcgaggaatgccacggacatttcagctcattttcgtactcaaatatgaaacaagttcgatttgatcactgtgctcttatgcaaagtgaatgcagcgatacggtgctccagcagacacactttgacggatgcgaattggaaggcgccagctttaccggcacgtcccttcaaaacatggacatcagcacgtgccgttttgaacagcttcatgtctccctcgacaaattgaaaggctgcaaaatcgcacctgagcacgcgattgccttcgccagggcactgggagctgtcatcgtataaccaaagcctaggacatcatcaggcggcgtgctgtttcagctgccgctttaatgccagtttccaaatctccaagagatgcataggaatatgacagcctgatgctgtttcggtcttcaccgtcataaatgtagccgggattcacaagcacctgccgtttcagcaatccataaaagaaacggctaacaggcaggtttttgtgaaatgtcacccaaatataaaagccgcctgcgggaatccgccacgtggcaatgtccccggcataccgctcgagaaaatgaacggcggcgtctctcctttctttaagcttcctgcgtacccaagtcagatgctcttcataatacccctgtgacagccactcggcagccgcccactgggacaggccgcttgatccgtagtctgtctgcattttaatgtccgccaacctttcaataaccggctccggaccggcaagccagccgattcgcagaccggggctaaccgtttttgaaaacgtgcccagatacagaatattgccctcatgatccattgctttcaacggctgcggaggtttttcttcaaaccataaatcaccgtacgcatcatcctcaatgatgggcagctgctctttttttgacaggctgatgatctctttccttcgctgctctgacatgactgtgcctgtcggattatgaaacgacggaatcgtgtaaagcagctgtcctccatattgttttcgattagaagaaacaagccccgctttgaccccttcatcatccatcggcaagccgcgaagccgcatcccagctgattgaaatacatgcaaggattgaaggtaggacggcttctccgtcaaaatgacagaatctcgttttaaaagtccaattgagatgagctgaagtgcctgaagtgcaccggacacaattaaaattgcagacggtgacacatggatcttctttccttttaaatggtcagccactgcctcccgcagctgacggtttcctttcggctgctcatatcctaaagacagggcgcccggattgatttgctgaaacatccgtccaattgtgtcagcaggcacaagatccggtgaaagttctccagttcctaatctgatgatatccgctcttggttcgttctgattaatagcttgaatgatggaagaattggcgcgatgaatgcccgaacggacgtaatcgctccaatcaagcggaggctcagccgccagcacgctccaagtactgtttacaaccttcgtaccgccgcctcttcttccctctaacaagccttgagacgtgagttcatctatggctgctgtgactgtgctgcggttgacttgaaacatgtcggccagcgttctctgtgaggggattttcgtccctacagcccactctccgtgaagaatcttgtctttcatatattgttcgatctgccgatgcagcggaacatccgactttcggcttggctgccattgcgacaaggtcatgccccccttttttacacattatacatttggctggttcctaacccaaccaaatggctggagactttagtgacaatctctcttatgattgaaaaaaaatgtgaaaggagctttttcagcatgaatgcaatcattcacggaattgtgctcgcgtttggcttaattttgccgctgggagtgcagaatgtgtttatttttcagcaaggcgcgtggcaaaagcatatttggcgggctctcccagctgtcatcagtgcttcagtctgcgataccttgttaatcgtattagccgttgcgggcgtgtctgtcattgtgcaggagctgcctgtgtttgagacagtcatgatggccggcggatttttatttttgctttatatgggctgggtgacttggaacatccgtccgaacacaagccaaaatgagaaacatacgttcacaccaaaaaagcaagctgcgtttgcggccgctgtttctcttttaaacccgcatgccattctggacacgatcggcgtcatcggcacgagctctcttcaatattcggggcttgagaaatggctctttatggccgcctgcatcgctgtgtcttggatttggttcatcagccttgcaatagcgggccggttgtttcagacgatagatacgagcggcaggcttatgctgatcgtaaacaaatgctctgcagcggtaatgtgggcagcggcaggatattttggggtgtcactcttttgcaattgaaggagaaacagatgaaaaaaacgaatttcttagaaaagggggcatactgatgactgatgcaaaacagttttatgactatcattcttgggcaaacaagaaaatatttacccatatcgaaaacctgccggaggaaactgcctatcaagaagtaaagagcgtatttccttctgtcagcgacgtgctgcttcatatgtgcagggctgactacatttggctgaatgttctttcgggagtggcctaccaagagattatagacagcgcaggcaaattagagtccgcgcaaggtaatatggcagcgattaaacagcacgctgccgagctggagtcacagtatcatgatttcttcagccgccagacggacttagaacagaccttcacaatgcagcatccgaaactaggtacactggaatcaacctatgcagacaccatcctgcatgtcgtcaatcacggcacttaccacagagggaacgtaaccgccatgctgagacagctgggccattctggcgcacctactgattatatgtactatttatatgagaaaagagaaagcaagggctaaaaatgtccttgcttttttttgcggaaagcctaaaatgcaacatattagcttttacatacctgtataagcgcgcttcacatctagctgtaccggcctgccgcttcgaaaggaattggttgcggcgatacccacttctaaattgatcgtcgcatcaatatctgtcacaatcggtgtttttccattccggacacactcggcgaaatgctgaagctccaagcagtaggcttcatgaaaacgagtttgaaagtctggaatgatatcaaaactgctccctttagccgataggatggtcacatgttgatgtctcaatgtccctatgaaaatactgccctctgtcccgatcacctccgcccggatgtcatgtccgtatggagaggttctgcttgcctcgacgtcccccgctgcgccggagtcaaattcaatatacgtcagcgcctgatccacatcgccatactgctccataaacggattgttcagaatcctgccgtgtcctgaaacagaagtgatttccgcccctagcaaataacgggcaatatcatagtcatggatggaacagtcgataaaaattccaccgctgtgtttgataaattctgcgggaggcgcgccttggtcgcgcgtaaagcctttataatagataggtttgccgatttctccagcgtcgatccgtcgtttggcatctgcgtatgctggatcgaaccgtctcataaagccgacttggcagatgacacctgtctcctgcactttttcagaaactgctctagattcctcaaggcttaatgtcagcggtttttcaacaaagatctgtttgccgttctcggcagctttgatgatcatatcaccatgtgtgcttgtcggcgttacgataatgacagcgtcaatgccggtatcttctaacacttcatacgggtcctctgaccatttttcgataccgagttctctggcaacctgctccgctctcccttttaacggatcaccgacacaaaccagctttgcccccgacacactagtgacgagatttttcgcatgataataaccgagccttcctaatcccaatactgcgcaccttacttgatgttccacgtcccatcctctcctttatctcatttcgggctcgctttgggaaagcgttttctcttaacagctaaaaaaacagcggttctatccgctctgccattttgcgcaagcgctttctcaaaagatggtttcattttacactgcctttggtttacacgcaatatgtttttttggcttcaactgtcctaatgaaaaaacccgctcattagcgggctcatgtgttgagcggtgatgtagaatgtctgactacaagctcaggcgggagcactattttttgtttcgcctttcgttttccctctattgcttctgccagcagttcgatgacgctccgccccatctcttttatcggctgggctacggttgtcaggggcggagccgccatttctgcgagtatcgtattatcaaaaccaatgatagaaagatcatccggcacttttatgcttcttattctcgcagcttgtatggcggcacaagccaatacgtcgttgaaggcaaaaatagcagtcggagcgtttctgtcgagcaattttcccgcttcttccttgccgctttccaaggaaaaccgcgtctggatgataagtgattcatcaatgggcacgcccgcttcctccatcgcctgacggaagcctttgattctatttttttcgcctgtcgttgacccgtctccgataatgcaggcgatgttcgtgtggccgagtgacagaagatgcttggcagcctcatatccgccacgaacgtcatctatcacaacaatatccatcggaagaagcggcttatcctgagaaatcatggcaatcggaatttgttcactggcgatttcctccaaagcagacatactgtcatggctttcaatccctgttgcaaaaataatgccatccacctttttctgtttcagcacagaaaaatactttgtttcttttttcggatcgtaatcggtgctgcaaatcaacatttgaaaaccgagctcatccgctctttcctcaatgcttttggccagttcgccgtaaaacggatttgaaatatcaggcgccacgagagcgatcatattcgttcgttttcccgttaacgccgcggcgtggacattgggcgtgtatgccatttcattcatgacattcatgaccttctgccgtgttttatcgctgattctccccgtattgtttatcacacgggacacagttgtgatcgagacacccgccgccttagccacatcgtaaattgttgttttcatgttcatccctcgtctggttattgaactttccggctgacaattttccggtattcaattggtgaaatgccttctatctgcttaaagagttttgaaaagtatgtcggatcttccattccgaccgtttccgcaataacgcccattttatcatttgtagaggataaaagacgcttcgcttccgtcattctcacccggttcgtgtattgtgccggagttacgccgagcacctgctgcatgcagcggctcacataatcctgatgatagtgaagggcgagcgacagatccttgattgtcgtcttttccttatagtgctcctgtaagtaccgggccgcctcccaggcaacccgctctttcgcagacggtatttggaacgcttctttttgaagatgcagcatcagttcctcaaataagatttgctttctgagcggcaaatcagagttttccgcggagtaatcgatcagcttttcaaactgctgcgccataaactgcgggcgctgcaccttgccttttctcggcaaggccaatccgtagcgggccggctcttcgaagctccctttttcctgctgaagctcagaccagttgctgcctccctttgccgtaaattcatatcgatgttcatcgaagtgaagccaatagtaggaggttgcttcatcactgcccttcgtcccgtagtgttcaagaccgggagaaagcaagatgtactcgccgccttcaacagaaaacgatgtttcattttccgttatatataacgttccctgtttgacatatatcagatcaaacacggagaatacacgtttcacatgggtttctcctttcttaaaaaccccttccccagctgcgataaataccggaaaaggcgggactgtaaacaggatgcgaggcatttgaatcatcctcctttttaagtcggatttttacaagaagtatcgtttctatccctttttattataaggaaatggaggtacactttaaaacgttgattttatttacgaaaggggttagacactatgaaacaagctgtcttcaaatcaactgctttgaaaaaacccgctgacaaaacgttctcattattttcgcttacttggccgatcttcattgaggtctcattatatatgtttatgggtaatgccgatacactgatgctcagccaatactcggataacagcgtggcagcagtcggcgtcagcaaccagattttaaatttaaatatcgtgatgttcagctttatcgcaacaggaacgaccgttatcatttcgcaatttctaggctcacggcaaaagaaagaagccatggaagtcgcttatgtgtcaatcggcgccaacttcttcatcagcctggccatcagcgccgtcgtctttttcgcggctgtccctctgcttcatatgatgggattatcaaacgcactgatgcctgatgcgaaagtctttttacaagttgtcggaggtctgtcctttattcaggctttaatcatgacattcagcgcgatcttaaaaagctacggctacacaaaagatacaatgtttgtcactatcggcatgaacattttaaacattgccggaaactttgttgtgatttttggtttgttcggctttcctgttctcggcgttgccggtgtggcgatgtctacatctatcgcccgcgtcatcggattaatcgcgatgattgtgattgtcaacaaacgcattcagctgaagatgtcgctgaaaaaagtctttcatatgcataaagagcatttgcgcaagctgctgaaaatcggcataccttctgcgggagagcagctttcatacaacctttcgcaaatgattgtcacgtattttatcgccatcatgggcgcgcaggcgttgacaacaaaagtgtatacgcaaaatattacgatgtttattttgctgttcggcactgcgatcagccagggtacacaaatcttaatcggccgttatatcggcggcaaacaatttgatgccgcttatgagcgctgcatgaagagcttatattgggcactcggaattgctgcggctacctctgttttgatgacgatcttttcaaaagacctgatcggactcttcacacaaagccctgacattatagcaactgcaagcctattgattgccatgaccattatccttgaaccaggccgctcgtttaatgtcattatcattaactctctgcgggctgcgggggatgcgaaattcccggtttacatggcaatgatttcaatgtggggcatcggcctcccgcttgcttatcttttcggcatccacctcggtttcggtcttgccggcatttggatttcttttatcgcggatgaatgggtccggggaatcttaatgtacagaagatggcgctcacgtatttggattcaaaaaggtatggcataacacccggctcaatcaagaccgggtgtttttttagatatcagagagaatctgcttcacttctctctgtgagagcgaagtgatgttgaaatacatcgtgctgcttcgcccggattttttctaaaacagcccggtgcaaatgaaaagcggctttcaccgttttttgagaatactgcggaaatagcggcaaggcatcctgacactcttcaaggtaggcttctgcttcaaaagcgatatactcccacgtcattgtgaacgccttattcacgacgcccttttgaaggtcgtcctctgtatatccaaattgctgcatcacttcccgagggatacggcttttttgctgttggccagtgccgatatctctcagaatccgaatcagctgaatcgctaaaccgagagaaccggctgcatgtgtcagctgtttctgatgccggcgcgccataatcgggagcagcatcaatccggctgcgccgcctgtctggtatgcgtgcatgagcaattcatcaaggtttccaaacggtttatcttccgctttctgtgcggcaatgaactcacggaatggcttgctgtccagtgtaaaggtttggtacgcatggccgaaagccttccacaaaaaatgattcccgttatacgtaccggaaaaaacatcttccgcctccgcttcaatggcagataacgccttctcatccgcattggctgccgtatggcaaaacgccataaccgcccaagctgcctgcctttgcttcagcggaagaaacgaaaatgctttgtaacaggctggttcgcgggcgctgacgatctggccgcattgctgataggcttcttttatctctttcatttctgttcactcctatgtatcactgcttcttcaagtctattatgttttctcgcaattgtatatgaagaaaaagccgattcctttgagcagaatcggctttttctttatccttcatcaatatcaatgcgatacgcttcaaaccatgtatgaatttgagcaagatgggcgatcagctgaggtcccttcatgagctgtccgaaccacggcaccttgaaggaggagccttccgtttctaaaagctgatctaattgttttctgtccagcaaggtatggagcacggagtccttttggcttctgatcgttttcagccattcgctgacgccttttgtatattccggatgatgtgttttcggatacgggctttttttgcgatacagaatgtcatcaggcaaaataccttcaagcgctttgcgtaaaatgcctttttcccgattatcatgcattttcatttcccacggaatattccaaacatattccacaagccggtgatcggcgaacggcacccgcacttccaggctcgcccccatgctcatgcgatccttccgatccaaaaggttcgtcataaaccaaagcatatttaaatagaacagctgtcttcttgctttatccacacccgtttcaccatctaataatggcgtttctgccaaggtttcttcatatttggcatttacgtattctttcagattcaattttttctgccatgagtcagaaagcagcttgatccgctcctccgttgatctcatccatggaaagccagactcaacatctgccgtatggaaccacgggtacccgccgaaaatctcatccgcgcactctcccgataggctgacgacaaagtcctttttgatttcccggcaaaaccacagcagggatgagtcgacatccgccattcccggcaagtctttgaccagtacagcttcctccaaatgatcaacgagatctttttggctgatgacgcatttgtggtgcgttgtgccgaaagcctctgtcattttttcaatccatggtccgtcatcattcggctgaaaagcgcttgcttgaaaaaatttatcgttctcttcgtaatcaatcgaataagtatgaagcggtgcttttccttccttttcaaaatggcccgccgcaatcgctgtaattgcgcttgagtccagaccgcctgataggaatgtgcaaacaggcacatccgacacaagctgccgcgtcaccgcgtcctgaaataacgatctgacattggcaaccgtgtcatcaaaactgtccgtatgtttttcgctttcaacattccaataacgccaaatattaagtccgtctttggaaaatgtcagcgcatgagccgggcggatttcttttatacctttaaatatgccagtgcccggggttctggacggtccaagaccgaaaatttcagaaagtcccgttctgtccactcgcgcttttatatcagggtgcgcgaggattgctttgatttccgacccgaagagaaatgaagagccttccttcgtgtaaaaaaacggctttacaccgagacggtctctcgcggcaaacagcagattacgcttttcatcccacacagcgaaagcgaatatgccattgagatggtcgacacagtcttcctgccactcgatgtagctgtgcagaagcacctcggtatctgacgtacgctcgaattgatggccccgcgcccgcaattctttgcgcaaatcttccgtgttatacagctcgccattgtaaataatggtgtacgtatcccctttataggtacacgccatcggctggcgtcctccttcaatatcaacaactgcaagtcttttatgtccgaataaaacatggtgctccccccaaacgtttgaatcatcaggccctcgtttggaaagagtgtctgtcattctgtccatcgtttgtttttcctggacgagctgctttttaaaatcgacccaacccgtaattccacacatgtgacatcagctccaatcccgtttctttcgtaacaatttcgtttctttcagcaccttagtaagtttatgcatctataggcagatagttgatttgtccataaaagagttgtatgggacaggcttgaattggaaagaaaagagaggaatgaagaaaaaggagacagcatggatgaaacggaaacaattgttatatacagaggaacgaaaatgggaatacggcaccatcctcatcgaagacggcgtctgtttaatcgaaaacggagaaggtgatatacttttggcggacactctccaacacagcccaatctgggtccatcataaaggaaagtgggagcaagccggcttccaggatcaattggttctggcatgcggtgaagaaaacatctccctttccgggggagaacgcatccgctatgagaaatcagtcaagcggccgctcatggcgcttttggattcgcttgacgacgaaacctttctcgcatttctgcagcacttgcacagcttcggcttatcggtattcgattgcgtcttttcttataataaaggagtcttttcgaatacttcggcggggcagggtgtgtccttttatcacttttcaaatgacaccgcacaatgcgcgatgcagcatcactacagcaacgaagggacaggagaccgttttgaatggacggcttcaaacggaaagcgatccattatgtattcagcagtccaacgggggcgcaaataaaaaagcggtgcatcgagcaccgctttttggttacttttcaacaacaacttttgcttccttgctttcttttttatctgtatccgcagccgtgacgtacagcaccgttccggctttttgttttttgattttcaccgaaaacgttccttttgcgtcagctttggcagaagcaatgactttctttgatttgtttttcactctgatcatcgctttgctgtttgccttcccttttactgccgtatccttcgttttcaccgcgtttactttcggtgtgccggaaggttttcctttgacgacgacaactttatacgatgttttcgcatcgccttttgttgctttcacatacagtacttgatcctgtttttgaggcgcgatattaaccttgaacgcattgtcttttccggctttggcgctgccgagtttctttttgccgttcatcacctcgataagtgtgccttccttcgcgtttcctctgacagctgtttgagtgctttccagcttgttgaccttaagctgtaaatcagctgcgctgacagccttcatgacgttcagccgcccgtagcctgaatgccagtctacaccaggtgtcttcggaatttcaatcggatcgccataatcgtcatacaactcttcttctccgccatcgacactttcaaaggaaatatcatctgccgtctttttcaacatatcctcaacttctgttcttttcagcttaggattttgagcaaacagcaatcctgcagcagcggcagcatacggcgtcgccatagacgttccgctcatgtacgtgacatttccgttcggcactaagctcgggatatcagaccctggagcagagatgtccagaccttttccatagttagagaaatcagcggtcatatccatgcggttcgttgcgccgactgacatcacatatttagaagatgcaggataagataaggcattttctccatcattcccgctggctgcggcaatcaacacatttttgtcagctgcgtacttcaaagcaaattcaagcacgcggctgtagcctccgcctaaacttaaattaatcacctttgctcctttgtcagcagcatatttgatgccgagagcaatttgttcagtatctccggaacctgcggaatcaagcacttttacagggatgatttttgctttggcattcaatccagtcattgaatagccgttatcgctttgggctgcaataatgcctgcgacatgcgtcccatgcccctgatcatccattgcattgttattccgtccgacaaaattgtgtccgagatctgttcttacttttccttttaaatcggcaagcgtgctgtctacgcctgtgtctactactgcaatgagtgtatcgttaagcttgcgtttggacagcaatgtgttggcaggctcatatttcacatccgcatttttgataccgccgttttcaccgttgtttttaagcggccattgataagggtactgaatatcgtttgccaggcttttgtattcctgtacgggttccgcaaactctacattggacatcttggatagtgtcgcagcagcgcttttgacccttttggcgcttgccgtatatgcgccgttctgtttctcgtctttcggaagttcaaatgaatacagattgtcaaacagtttctttgcctttttcacattggatatgtcttttttcgattgcgcgcttgcagaaaagcccttcatttcattatgtacggatgagaggcttttattgtccttcaccttgaaaataacctttgttgtctgaacttcactttttgctgcaatattgttttctgttaaaatggctccggctgttttgccttgcagctgcttcatatttagtcggtccgcttgtttctttatctcctctttaaggaatgacgggactgattgtaaagctttatcatatagccggttgattgctttttgatccttttcagtgaccttatgcgaagatgatgctccgttttctgacacatcgtcaaataacggctttaatgtcacaagatcctgatagatttcatttcttgctgttttatttaatgcgagttttgcaacgataaacggtgctgctttgtaataaaggcttgtcagttctttgccttctgctgtttggctcagctgctcatcacgaatcgatctcaacttatccaggatgccttttcctgatttcttctgatcgacactcatttcaaccggacaagcttcttcctcttctaaatctgacggctgttttttggtgcctttatacccaatcgtatacttggcttctgcagctgcttctgccgttccgccgtcctctggctcttcttctccgaggtattcaacttttacatagtaagggccgctccacgcgtatggaaaaatgacttcgctttttccatcctccgctgtgaaagaacggtacatctcaaacgtctcatctttaagcgctttttccttacttggatatacagatacattcagtactgaatcactctttacggtcagtgccatatgtgagtttttctgaatatccgttgctcccggggtcactttgtaccatttcacctgttccggctccttcatggcgcctgtctgctctttgccgttttccagagcagccgcctgatcgatcgcgccggccgctgcagctttggttcccggagaaaaaaggctgaaaatcagtgcaaaaataagcactgccgccacaaccgagctgaattttctgcgtttcatgttatccctcctgcaaaataatgaatctccttgaaggtatcataatttcataggacgagataccgcttacagggaattttaaggttattttaaatgatttggaatataaggggataaatataaaaaaacccaactctatcaaagagccgggttcataggtttttctattaaaacaattgaaaaccgattggcaaatgcagaccgagcagcactgtcagcaaaaggacaacgacgaagccgatccacaggcctcctgttgatttttcttttttcttgcggatgaggagcatttccatcaggccgatggtgataatgcccagaatcattttgccggcgtattctccgttccagttggcgaaacggacaaacagctcagctcctgtcaaaataataaggatatagaataaccgcagaatcatatgagtgatttttgcgccctttgcacttcctgacgaatacagcgagtagctgacgaaaagcagaatcagcgctaccacccatgttgtaatatgtaggtgtgtcatatatgttccccctatcagataaattaccccacttatagtaccatgaacttgtcctctgccacaaagatgattgtcagaaaaaacgggcgggtccgggtccgccctccagttttattcagccaatttggtttgacagcgttccgatcgggtcaattgtaatatcaattttgtcacctgaccgcaagaattttggaggcgtaaaccccttgccgacaccagacggcgtaccggtggcaatgatgtcgcccgcttcaagcgtcatcccctttgagagggtttcaattaattccggaatggaaaagatcatatcgcttgccgaaccggattggcgcagctcgccgttgactcttgtttcaaccttgaggcgctctggctcctgaatcgttgatttatgtacaagcacgggccccatcggacatgtcgtatccaagctttttccgataaaaaactgcttatgccttttttgcagatcacgcgccgtgatatcattcacaatcgtatatccgaaaacatggtcatatgcatcttcttttgaaatgcgagtcccgctttttccgatcacgacagcaagttctccctcataatcaagctgagaggtaacctcttcatggctctttacgatatcaccatgccccgtaaccgttaccggcgattttgtaaataccatcggatgctccggaatatcagcctcgctccccatttcaatcgcgtgatcccggtagtttttgccgatgcagatgatattttttgatggcttcggaatgggtgcatgaagcttcacctcagataatgaatacataaatgatcccagctcatcattcggtttctttgcccactcggccagctgccttgcatgcgcaacgaatttatccccttctgcgatacattcaatcagcgatcccggaatcgtctcaagttcaaacagttttttttcagccttctgcaaatccataattttctcatcgtcaatgatcaggccgacaaacattcggttgtaaagttcccctgtcgcaaatttcatgttattcctccatcatcttttaaatcagaatgctccttcatgtattctctgtcgaatgctgaaatccctttttctcaattccgttttcatttcgtttcaggacgggcttgctctacatatcatacaaatgtcgttttgagaaggaggaaagaatatggagcgcgtgcatttattttttcatcgggagcagctgaaaaggaaaggtacagccaaggggcttttcgtaacagatcgatctgtttctcccattcttctcacacagcgtgacagagcggaaaaggcatcctatgaaatcagctgggaaaagtctctgcttggtgaaaggacactttttttgaatgcagaacaggatgatccgtccctgatgcggcgcagactcgcctattgtttttttgaccagatcggcgtacctgctcccgctgcctcgtacagctttctgaccatcaatggccagcctgaaggcatttatttgaacatcaagaaccatcagccagccggtaaaaggagttacggagtgaagacggccgatccaagggttccattgtccctttttaacaatgatttctcggcattcttacatgaatttttcatactgatccgcacagccggagatgacgaattggctgaaaggattaaattgtatctggatgtcaagctgttttttttgtggctgatcggcaacgcctgcaccaatcaaggcttttactacacattttgtttaaacgaatccggtcggctttacgtttccccgatggagacaagatcgcttgccgtacaagaatggtatgaagaagacccgcttctgacaaaaggaaagacgctttcgtcaaggcttctatccattcccgccttcaggtcgcaatatcacaccttaatgaaaaacgtgctgaagcggtcgtttactattgaacgattatctcctctcatcaacgaatggcaccttgacatttgtcaaagtgctgctgatgatccttttatcaaaaaaagcccctttcaaatcgaaaaggagcagaccaacatacttagagaaattgaggaacggcaggactttttgcaagcacacttagcaagactttagtcctttctccattaaaaaaggccgcagcaaaaattgtcgcttttttagtcaaattgacgaaaggcaaccttttgagccaaaataggttatactaacgatatcctgtattatatcaaaataaaatctagaattggagatagcgtaatgaacagtaaaattgaagaaatgaggatcacactaattgaaaccgcacaaaaatacggcatgaattcaaaagaaacgattcaatgcagccaagagctggatatcctgctgaatacccggattaaagaagaaatgatttttgggagatatcttgaaaactcccgtatgtaaatcattttctataacaattagaatacaccacatgtaactccgatttttgctcagcacttctgagatatacctcagggcgagaatgtgcccgcccaaaaatcgaataccgcagcacgacatactccaaaaagcattctacacgcaaaaacaccaaagaaataaacaaaaatcaccataggcggatagcggcatccttcgccgcatttccgctcaatttatacccaacatcctcttttgccatgtttaaacataacggcccgaaaaaataaaacgctttcacaaagagccgatatgtccccttaaaatttctctcacacatatgtgcgtttgtcataagctatcgtgaatagcccaattgaaatcagaattgtcatttcactttacctgtctttttttaatttttcaacaaaggatgtgctcgtatgccggccattgtcggagcgtttaaaattaatgcgattggtacgagcggagtcgttcacatcggggactgcattacgatttctcctcaggctcaggtcagaacgtttgccggtgctggcagctttaataccggcgacagcctcaaggtgatgaattatcaaaacgcgacgaatgtgtatgacaatgatgcggttgatcagccgatcgtggccaatgcgtaaaaggagtgaggctcatgaacttctatattaatcaaaccattcaaatcaactatctccggctggaatcaatcagcaactcctccattctgcaaatcgggagcgccggatcaatcaagtctctgtcaaatttgtataatacagggagttatgtagaaccggcaccagaagtttctggctcagggcaaccgctccagctgcaggagcccgacacaggttcattggtcccgctccagcctcctggccgttaatcatatgaaagaggtgaaagaacatgtatgatcaatctgtttcctcttacctgcaaaacttgaattccttcgttcagcagcaggcgattcacattcagcagctcgaacgtcagctgaaagagattcaaactgaaatgaatacgatgaaacagcggccggccactaccattgagcgtgtggagtataaatttgatcagctgaaaattgaaaggctcgacgggactttgaatatcggcttaaatccgactgacccgaacagcgtccaaaactttgaagtcagccagtcgacaccgcaaatcgggatgatgcagcaggaagagagcgctcagctcatgcagcagatccgccagaatgtcgacatgtacttaaccgaagaaatcccagatattttggaacagcttgaaaaccaatatgacagcagacttgacgatacaaacagacatcatattattgaagacatcagaaaacaaatggacagccggattcactattatatgtcccatatcaaaaaagaagaaaatacaccgcctgcacaatatgcagaacatatcgctgagcatgtgaagcgtgatgtcatccgcgctgtagaacactttctggagcatattccatcagaaatgaaaggagatgagcaagcatgatctttacagtcatcaaccgcagcttggaagtcggggacatccggatgaacggtgtgtccagttcctccgttttccacatcggagacactgaatccatctacctgtcttctatttttgatacaccgcctgaatctcttattatcgggccgtttgttccgattgcgccagaataatgcttaaacgcatatcacgcatcagactagttaagtttaattccctcgggatcgcaagtgtgtttcaagttggcgacacaaatgaaatcgatatgagtgtaaaagtatttgctgttcagcgttctctgtccacgttttacaataatgaaggctcatttaacaaaaaggagtatcagatctttcagcagcaggccgtgaagccgctccccgaaacaggtgtacaaagcgctttttgccacgaggtgccggctatttatgttcgcagcatcaaaattcaaggggtctcagcctcttctgttttacatgccggatcagcttcgcttattcgcggtgatgcgagactcaaacatatcagacagattcagtctccgcgctcacaatcgcccgccaagaacatataataaacagagacttcgataaagggtgtcgtttatgccagcaattgtcgggcctatagctatcaattccatatcgggcggagtcgtaaactttggtgattccttttacctttctccgaaaagctcttcaaaatctgcgctcggttcgggagcaggaaacacgggagatttccttctattaaataacgcagtcaacgcgacaaattatatagaccccgatgtcaacgatcaggatatggttggaaacggataaaagcagccgctctgcaaagagagggctgctttttagtcattttttcttttttcgttcatttgatttctttgttttgatcagcttctcaggcggctgttttctgatccatttgacaaaccgggcaagctctggatcgcttctgagttcagccattccgtttaaacgtacggcgagctcttgattggtatataaggcatgaatctgtttatggcaaggaatacagagcatcgctgtcggcaaaaacgttccgccttcctctttcggtgtgagatgatgctctgtcagctggacattgctccggccacacagctcacatattccggcagtctgctttgccatatccgctcctcccttacatcaactcaagtgatacccgcgtaccgcggccgctcggttcagccggatggacgatcagctttttcggaagccgtgcacgcagttcctgcacatggctgatgacaccgacagccagattgtctgactgaagtttttccaaggccgttacaaccgtatcaagcagatcttgatccagtgtgccgaagccttcatctaagaaaaagaactgcagcgggtattccccccgaagctgaatctgcgcagacagcgcaagagcaagtgaaagcgaggtgaggaaggtctctcctccagacaaactggaaaccgggcgtcgtacgcctccattcgcgtcatcccgcatcacgaagccgccttctgaatctacttcgatggcatagcgctgtcttgtcagcatactgagtcttgctgaggcgtccctcgcaacgctttcaagctgctcctcagctaaaaattcgacgaaggtattgcctttaaacacagcttgcagcttatccagcctgtcgatatgcgtctgccattttttcagttcagcttcaatttcattaaaccgtttatgatggtcgcgaatgacagccagtgcttttgcagccgcgcctttttcctctatagcagcgccaaatgcgtcctcagcttcttgtaatgctgcaacggtttcgttccattcgctctctgataatgctctgccggcaagtatctctgctactcgttttaagtttgcagcattttgcttcagtttatccataaactggtctatgccggttttcatcttttcaagttcatcagctgggatgagactttgttcaacctcctcagtccgggtaatggaggtgttttttgtatgctcaagccaagcagcttttgctttttccaatctgcccttcgcctcttgaagagtgagctcgcttgccgaagcgcggcttttcgcctggttgagcttcatttgggcgctttgcagttcttcatataaagattgttctttttcctttaacagctttagatcctgctggacagagcggagtttgatttgaatcgaatctccttttgcataatctccgagttcgtgctcataatcagctatcacgctcttgatgcgttcagccgcataatgaagctccagcttttctcgttcaagccggtgtcccgattcccgcagtttttccttttgtgcttcatgctcagcaagaaacgcaatactcttctcaattcgtttttcacattcttctgcagcccggtccttttcttcaatagcttgctgccatttttctgcttcgtccacagattgattctgaaatgcttcattaaacatgttcagactgctgtccattgaggattggagctcagtgataatgctttcaatacggtcagcctctcttttttcaaaaccgattttttcattaagctgctcggccttttttaaagattcctgataggcgccgatcatttgtgccattcgtgtcttaacagaaagaatgtcctgcttgattcgtttccattcgaatttggcagtttcaaatgcttcatacaccggctgatgttcgaaggaagctgccgcttcaaggttctgcgcttgaattgtctgcaaaaacggacactgttcaataaagcgcgcggactgttcttcaagcgtaattttggctgaaagaatctcctggctgagaactgcagcttccgtcaataacacatctgtccgtttgatgtcctcttcaagatggctgtcggcttcatatgtttcatgtactgaggcagatggatcatgatcggttgaaccgcataccgggcaaggctttccggcagtcagcttttgggctaactcttttgtcagcagtgccacccttgctttttcacgctgtaagtgaagcgtgtgttgactctttctagcctcttccgtcatacgtgttaatgagcgttccgtttcgcacaccaaatgatacacagtttgaactgcctcatatgcctgaatgatgttgttttcttccgcttccgtcttttgaacgagtgtattcttctcttcattcatcttctgcagcacgaggttcaattcttcacttcgttttttctcttttttgatttgctcctcggtttgtctgatgcgcaataccatttctgcggcctgatggcagctttttcgctcattggatgtcacctgcagggatttgagctgctgtttcaattctgtctgtctgttttgtccccgcgtcaggcggtctgttaccgtctccaattcattcatgacagattgaagagcctcttctttctgctggagttcagtctttttgcgctctttctcttgcttggcctcactcagtttgatttcgatttcctgcaagcgtgaaagctgttcctgctcagttaaaagctcaggctctttctcgcttttatgctggcgccacgcttcatactcttcatgtttttgctgaaagaaagctgtccggtctgctaaatccttttgggctagcgtttgttccttttcagcttgttcctcatgctggatcgcttctgcgtaccggtccgcatagggcttaagagctgctgctgtttctgcttccagcaggcgtttttgcatgctgtctatatgcggctgttcttctgcgagacgtttttcctcttcttcataagcggatttttccttttggacattccatatctcctgatgctctgtaaaccgctccttcgcctgatcacggttcttcctcatcgcttccagccgggcttcagcttgttcgagagccttttcagcctgctcaactgcctctgagctcgcctcaccgagaccggactgttcagcaagcatttcattttttctcgcattggcttcctgcgcctgccgtctcagctttttcacaagcctgtctccatattgctccaaattaaataaacgctgaagcatatgcctgcgctctgccccttttaaagacagaaattcagcaaatttcccttggggcagcaccaccgctctcgtaaaatcgtcgatcgtcagccctaagagctcctcaactcttttattcacttcgctggctttatcagccagcaccgtatgctcgtccttgatttcgatgaagcggcaaagtgccgtttttaccttcatttcatccgttctcttaaacacacgctcgactttgtatgagatttggtgattcgtctgaagcgcaaaggtaaaggaaacagacagcgtatcttccgcctggtttaagataccgtgcgtattattcgccgcccgttccacctttccgtataaagcaagcgtcattgcgtcgagaatagaggatttaccgcttcctgtcgggccgaaaatgccgaaaacaccggcaccggaaaggccttcaaaatctatcgtctgctcctctctaaagctgtggagccccttaatgcttaaggcgatcggcttcatttcgcatcctcctcttcaacgcctgatgcaagctctaaaaacagcttcaccatttcttcatccggcaccgcaccgccagtttgtttttcataaaatttcttaaaccggtcttcaatggatacatgcttaacctcgatccgttcccggtctctcttctgttcttcaaaaaccggcctgatatggataaagcccgggtgcgccttccgcagcctgtgaatctcttcaagtgacagctggtccgcgacacggatttccaggtcaatccaagcattctgatctctgccttcatccagccagctgtacacctcatttaatccatttgccgctttccacttcacaagtggcttgccgcttgataataacacctcttgccaagtggcctcttccccaggctttgcgtccacaatcgtcactgatttagcgtagcccgcttcagaaaagctgtaggcgagcggagatcctgaataacgcgcaagcgtccgcgcccgcttgatcgtttgcgggcgatgcaaatggccgagcgcaacgtaagcggcatctgccggcaggctttcagcagccaccgtgtatgcaccgccgacttcaatcggccgctctgaatcggtttggtttccgcctgccacataaatatggctggcggcaatcttcactgcatcgttccggaaccggcttgtcatatgctcaaacgcctgcctgattttcacatcatagtgatcacggagcagcttttcatcaaacgtatcggatagcacttcatttaaccgcgcttcagatgggtacgccagcgctccaaccgccaaaagctctcctgctgaaggcacttcaatatgaatcggctctgttgtcggataaccgattaaatgaatgccgttttcatgtgtcagcggtgaagcggcggacaaacggtcaggattatcgtggtttccggcaatgactacgatcgggcgctttcctctgtcgctaagcgcagacaggctttcataaaacagctgctcggctaaagctggcgggtttacggtgtcaaatgcatcccccgccattacaatggcatcgatctgctcatcctttacaatcgtattcatttcatccagcacatcggcctgttcactcagcctgcttcttccttcaagcgtttttccaagatgccagtcagccgtatgtaaaatccgcaaatgctttcacctctcttttatatagaaaacgagacccgctccgcctgaaattccggagcttttggatctcgctataatgtcagaatgtgccctccgtcaaagaaataaagcgcacatccctttacctttgtttttgcaatttgctccactgccttcgtgtacagctgaatttgcgtttcatatcgtttcttcaagatcggggccgctccttcaaatccatgctggaatttgccctcaatccggtccgacttataatccaatagatataatccgtcctcagtttcatagagacagtcaatgataccctgcactaaaagcggctcatctgcctcctgtgcatcaggatagatctccttggccggaagcgctaagctgaatggtatttcccggtccttccacttagcaccgatcagctgtccgccgatttccgtatggaaaaattgcacgatttcttctatatcaatagcgtctttttgttcttcagtgagaagctctttttcataaagcctgtgaaccgtctgctcagcttcttctatcgacggcacatgtgacagcgggatatgctgcataaccgtatgcatggcagtccctttctctgccgctgtcaggccttttttcatcataaaagcgggacgtctgtacagaatgcttccatcagccggttttacaggggccctgccgctgtattcatcctcgtactctctttttcttttgatctcagaaaccgattgctttgtccgaatttgcgtcacctcgtgatgcgggtatgtccagctcagctgctcgcgggctttttcatcaaacgcaaacgagccgggaactggttcacctcggcggatcgcttctaggcgctcgcttttttcttccattctttcttccagatcatcatcaagcaaatcataggaatggatcatttgaacggcaaaacgagccgggtgatctgagatgtcagcgtgtgctggcacaccagccaaatcctccaagtctctgtgcctggcaagagccggcccgatgaaatctagatacgttttcgcctgatagcggtcaaattccggcagaagccaatcagtttgggacgcggatgcctgccattttgcaagctgtttctgatgatccttacatgagccaatcagaaacagcttttccttcgctctcgttaatgcaacatagagaacacgcaattcctctgacagcagctccctgcgcatttttttcttcatcgcaatgagcggaagtgtcggatagctgatgcgtaattgcggatgaatatacttcgtgccaaatccgagctccttatccagcaggtacgatttgttcaaatccatcatgttgaaattccggccgagacctgctgcaaacacgactggaaattcgagccctttgctgctgtgaatcgtcattaagcggacaacatcctcctgctcgctgagcgctctcgccgtaccaagatcatcgccccgctcctgcatacgttcgataaaccgcaggaaacggaacaagccgcgaaatgccgttgattcatattgacgcgccctgtcataaagaacacgcaaattggcctggcgctgttttccgcccggcatcccgccgacataatccatatatttggtgtcgcggtacacttcccaaatcagctcagatactgagtggtttttcgaaaacgcgcgccatttttgcagatgtccgtaaaacgtatttaacttttgataaagctcatcgttccggtcaccagcagccaggtagtctttcatcgcctcatagtacggcgcttttttattttcaagccggatcaaagacagctcgttttcatctgctccgacaatcggtgagcgcagcacagaggcaagcggtatatcctgatacggattatcaatcaccttcagcacagaaagcgcgacggcgacttcgaccgcttcaaaatagcctgacgttaaattggcgtaaaccggtatgccctgtgctctcagctcctccatgatttgcggagcccacggcatcgaacggagcaaaatcacgatatctcggtattgaatattgcgatgtgttttcttttttccgtcatacaccttaaatggcgatgaaatcagcttgcgaatttccttagcgatggcttttgcctcaaactgcaccgtttcaagctcttctgcttcctcgcttgcatccgtatcttctgcgttgtcgatcagcagcagctctgtttccgtctcgtcattgtccggatacgctgcaccaagcttcagctcagcctgctcgtcataatcgacctcaccgattttgccgcccatcagctgtttaaataaaaagtttgtgctgtctaaaatatcagcccggcttcggaaatttttatttaaatcgattttccgccccgtgccttctccgctctctgtaaaccgtttgtatttagagaggaaaagaagcggctcggcaagcctgaatcgataaatcgactgtttgacatctcctaccataaacaggttgccagtctcctccggcccgcttgtgacaagctgcagaatcgattcctgcacgaggttggtatcctgatattcgtcaacgagcacctcatgaaactgttcctgataaaacctcgcagcctcgctcggcccacgttcacctttgtcattctcagctgtcaaaatcgctaaacagtaatgctccaaatcagaaaaatcgatgattgatttttcctgtttcgcagcttcgaatcgttttccatagctgatgacaagctgtacgagcgtttcaatgacaggcttcatctcggctaggcttttcaagtgctgttcaggacttcgcgtgaagtagtcggttttgagcttttcaagcagtttttttgcgccgtttctcaaatctgtcgcctcatcaaggagcgctggatcgaactcatccccttttactgctttggcacgcttaaaagagacggcgggcacccgcttatatagttcactgaaatcgtcctgatgctgaatcagttcatcaatctgagcaagatcatcaagaaaattgtcagcacgcggcgccgggccgcccggcgctttcgtcagctcaagcgcgcgcaagagcttttccttcgccccgttaagcaccattgcaatatcttctttgacatattgataaaacggcagctcctcgatggcgctcttttctgatacatcatacaaatgaacaaagctttccagccacgcctccgggttgggatgggatcgggaatactcgtacacctgtttaacgagaaattgcagatccagatcatgccggtctgtcgtatagcggtcaacaagctcaaaaaacgccttttcgccctttgcgtattcgtcttcaaacagctcgtcaagcacttcatccccgatcagctcgccttccgtctgatcagctatccgaaagcccggatcaagatcgatcaagtagtaatatttcttcagcacttgcaggcaaaaggaatggagcgtcgaaatgctggcccggtttaaaagagacagctggcgtctaatatgcagcgagccggggcgctgtacaagctctttttccaaggcttctgcgattcggtgcttcatctctgccgctgaggcgtttgtaaatgtcacaacgagaagacggtctacatctattgggttttcctccgcggtgattttccgaatcattcgttcaacgagcacagcggttttaccagagcccgcagccgctgccacaagaatatcctggccggttgaaacaatggcattccattggtcatctgtccatgtgctgtctgccggtttaggaatgttcattgccatccgcctccttttttatccactcaagtattgtcttgtccttttcagcctttaatgggcgatactcgttttcttccagtgattcatcaaattggcatactgatttgaacgcacagtatgtgcacggcgtcttgttcttcattttgtacggctcaatggatacgcgcccgtcggtgatttgttcgcccgcttcttggaaggtgcggcgcacatgctttgtcaaaagatcaaattccttttcaccgactgctgctgagtctgatctgagagagccgtcttttttcaagccggcgtttatgatatttgaacgtccctcttgaagggttgtatccatgaggcgaaccacttcctgatcaccgaggagcaagcccttcattttaaatttcttaaagatctcctgttcaatctcgtcaagcccaagcgggagattagattgaatcatcgggtcatgaatatggaaatacagcactccggcaggcgtcgccctcatcccgagccagtcagctgaatgtgtaatcgataaatcaaggtacgtcagcatttgcagtgccaatccgtaatatacttccgctaagtcaaggcctttgtcgcttgatttataatcgacaatcctgaggagcaggccttttgagctttcagccttatcaacacggtcaattcgcccgacgagttccatcgtacagccgtttttcagttgaaaggtcagcggcggaagcggcccttttcctccaaagcccagttcaagcccgatcggtacgaatccgctcgctttcgcatgctcgcttaaaatgccggacacacgtgtcacaattttttgcagtttttccttcacataataatgccggtttgagctgagcagaatttccttttgcagtttcggtgccagccgctctaccgcatcataggaaaacagctcgcactgctccttcgttaaatcgcgccaatccagcttttgctcacgcagcctatcagaaatcagctttaagctggaatgaaacagctggccgatatccggtgcttcaagcttgaagaattgccgttccttcaaatgcagcccgtgtgacgcaaaatgggaaaacgggcatgcgttaaaggtttccattctcgatacactgccctgaatgcgttcaccatagagctgtctcgacacgctgcgttcaagctgcttcacttcattccggaaaaacaggcttgagaacagctttttcgactgcagcctgtccggctcactcatcagcacattgtacgtgctccaccagacgtcgctgatgtcgtattcccgtgtccataacctgagctggctcgcggtaaaggactgtgccacgcttttattcacgacatacatcagctgttcctcatcgctgacctgttcaggttcatttgttaacaggcgctccttatgatgcggaaacagttcttccagccgcttaacgatcatcgacggcaaaagcgtttttccttctgcatcagcaatcggatacgatacgtaaagccggtcagacggacttgaaaacgccatgtagatgaggaagtgctcatcaagcaaacgctctcgtccgcctgaggatagctcaaccccaatcgttttcagccattcccggtcgtcatccgacaggaccccgttttcatcagggcgtgccggcagaacgccgtcgtttgccccgagcacaaaggtgcaggaggtgccatacattctggacaaatccatattgccgacaaacacctggtcaagcgcaggcggaattagagaaaatgtaagcgactccgcgccggcttctatcatttgctgaaacaaatcaagagaaatctcatcatctcccatcatttcaacaaactcctcaagcagctgaatgactgcgtcccacgcctgctgatgttgctgcgcttcaataattctgccgtcatcctcagcacgctgcctttcctgatccagcttcagcggcacatccgtctcttctaaataacgatagagcgcctccgccttctcttgaaccgtcttcgcttttttcatgcgtttttgaagctgaaaaagcggcggaacaatccaatcgcgggtgtcattcaacatgttttccatttcgatttcctgatcagtctgcgcaaaatcatcatccaatgacacaaaacgcctgtattggaaccgatcgccctttgtccagcggtcgcctttaataccataggcgatacagtaattttcgagctgatcgacctgttctctcactttggccttcggttcattgagcgggaatagcagttcggttttcacgcagcgaaacaccgcttcataacgccaattccctttcagaacatcaaggctcgaccggataaattcaattaacggatggttcagcatagatgcttttccgtcaatgaaataaggaatctcgtaatctgcgaaaacttccttcaccatatccttgtagtcttccggctggcgcgcaagaattgctacatccttatagcgatatcccttctctctgactagggcgtgaatttcccgagcaatgccttccagctcagctcgtctgtttgcggcctgcatcacagtaagggcttcttgtttttctgcgtatggaatggccggacgcgcttcatactgtgcctctagatgcgccaattccggcgtctttgtatgccgctcagtcccgctcagctctttatacgtaatgtccaaattcagttccttcgccttctgatgcaggcggtaataggttttccccgtcattctgaacaattccagttcatgcggctcccgctcatatgacggcttgtccgctgtgagcgaaaacgtgatatgctccgcatgaaccataagctgctccaacaccctgaattcctgcggggtaaactgataaaagccatccacatagatatgggcgccttttatatcttccgcaagcgggatatgctctgccagcaatgtcaaataatcctcagagtgaagatattgatctgcgaggcttttttccatttgctgatacagaattgataagtcatggagcttttcagataaaacacgttctccgcgatactcggaagccgttccgctttccgccatccggcggatatcctccggttccagacaatagcgcttaaactctgtcagcatccgctcaacctgtgcggtaaacccgcttttgtcactcgctttttgatagactttgaactcctgtttatgctcctcaatgagcttccgcaggagcatttgtacgccggtgctcgtcagaaacggcctgctcattcctcccgtatgctggaggacgcgccaggccaatcgtgaaaaactgaacacttgagcgcgtatcatcccgcccatatctggcgttttagcaagctcgtattccattaaaaacgtcatttgatccgggactagaaaaatgatcggcttcccgaatggagcccggcgcaattcatcctgaatgctgttgatgatcagcttcgtttttccactcccggacctgcctactaaaaactctgctcccaaattagaagacccctctctttttatctctctatattttatcgaatgttgacgaaaatgaccaatctgatctattggtaaaaacggccttttcacatataaaaagctgattatctccgcacatctctccctgcccaacatatacttttacagaagcccaattcctaagaatggagttgaatccccttgcattacagctactatccctatccggtgccataccgggaagatcctgttttgattcggaatttgcagaaggccatcaacggagaattcagtgctattcaatgctaccgcaagcttgccgaactcgcccacagcgatgaggtcagaaaacagattgaagaaatcaggcgtgacgagattcgccacctccgtgaattttccacactgtatggttcaattaccggcaaacacatcatgccgaaacaaacggaagaatgcccggacaatttcacaagaggactggacgccgcttttaaagatgaacaagaaaccgtcgacttttacttgcgtgcggccgaggaaacgtcaaacttaaaagcgaaaggcgtctttacgcgcgcagcacgtgatgaacaaaatcacgctgtctggttcctatactatctgatggaacgttagatatacccattcagggtatatgtacatatccccttagctaaaaacacactcccctgtttttttcaaatgcagccgtgaaacataaaaccatatactgtcatacagggggaatcaaccatggagcaatattctgaggcttgtattgaggcttgcatcgattgcatgaaggcttgcaatcattgtttcactaaatgcttggaagaaagcgtgcagcatcatctcagcggatgcatccggcttgacagggaatgcgcggatatttgcgcgctggcggtcaaagccatgcaaacggacagcccgtttatgaaagaaatttgtgcactttgcgccgatatttgtgaagcatgcggcactgaatgcggaaagcacgatcatgatcattgccaagcatgtgcgaaagcctgcttcacctgtgctgaacaatgccgcagcatggcagcgtaaaaaagagggttcaaaaaagaaccctctttttatttggacagccatacggagtacaaatcaatccatccctcttcatcaagcaccaggccttttacatttttacttgatgtcacctggagcacattttgatacagcgggatcgcgttcagctcctgtatcatctgccggtcaatgtcacgcaggatgttgattctcgaacagcggtcaggcatggaaaacatccgctctgtcattcctgagcaaatctgtgtcagcttttcagatagatgctgatacaagaaactgttctccgacagcagcaaatgcagaaaaccaaactcgctgtcttgataaaacgtcgcactgtcatgaatgatatccgccatctgcacgatttccggccgtcgcagatcagcagcatcacagaattgaagtgtaagcctgataccgtgctgggcgcaaatattttgaatccattcggcgtcctcacgatgatccgtttccgaaaaggtataaagcacgattgtttcgccctcgtatccgctttttttcaacaattcagatggcgaaacgccctcccactcaaaaggactcggatgcaaaaaggacgtaaccggaattcttcggtgccctcccgcttcacgaacgagccgttcagaggaaatcagcagccggagcgcttttctaaagcttcggtgctgaagaggccccttctttttcagattaagcgacaaatactgaacatgccgctcatcaaagacagtttgctgctcaggacatgtttgtttttcttgaatggtaaaaccgttcatctctccggcttgctcagaaaacacaaactcaacgcgatccaaataggggcgtcccttgaagtagcgctcattggcttcaagcacaagcatcccgctatgttgctgattcatctgaaaaggccctgttccatttttcccgccgccctgttctgccggcagtatggacagccgttcatcacaaagagcatacggcaaaagcgcattcggcttatcgagtatgagctccacacaataagggcccttttctaagacttgtttcactccgtgcagaagccatttatacgggttgtcagccagttccaaaaagcgctgaaatgtaaacgcaacgtcccgcgatgtcagcggctgtccattatgaaataacacaccttttcgaagaaaaaatctccattgtttttttccgacctcttcccatccatgaaccaaatgaggctttggctcctgcatatccgaatcaaacgtgaagagtgtatcaaatatctgtttgacgaaatggccctcagaccgcaaaaatatttggcatggatccaaactgcagacagattcgggcgtgatgaacagccgcagaacatccttcgccccattctcgcctgtctccgtcacaaatccgaatacctctgaaagccacatgttatattcgttttgaagccccggaaacgcggactgatactgctgaagcagctcctttgcctttttaagctttcctgacatggtatattcctttgcagtttgaagaagcagttcctcaggcctccgaagaaacgcgattttagatttgcggccgcgccccgctccgcttttccggataatccaattgctgttctccagcttttgtaaaatgagctttgcatttctttctgtacaaaataaacagtcggcaatctcagtgagcgtcatttcgttcatttgtccatactcggcgcagcctgtttttacaagcgccacgtagtgctctatcagcttcaatccccgcacctcccgacaaaaggggaacttttatctcttcttttcttcactttttgggccgccgccccttctatacactactactatatcaaacagcgaaaggcggcgatcacatgttgaccagttttcactctataaaatcgagatataccgctcccgttcggctccgctttttcggcgaattgctgacaagcctgacaggtgcaatgatgggaccttttatggtgctgtatctgcatgaacaattaaacggcagtatcatgatgccaatgctgatcatcagccttcagccatttgctgatattttcctgacgctcgctgcaggaaaggcggcggaccggattgggcggcgcacagcgattttgaccgcattgcttcttcaatcagcggcaatgacagggtttgtatttgctgagcatgcgtatgttttcgctattctctatgtcatgaatggcatcggaagatcgttgtacattcccgcttcccgcgcccaaatcgccgaaagcacgccggaaagcagacgttcggaagtgtttgcggtcatcaatgcgatctattcggcgggactgacggcagggccgctagtggggatgctgctgtacaatcataaccccgtgtggatattcgcattagatgccgcagcattgtttatctactttctgatcgctgcactgaaactgcctgagacaaagccgctacacccagctgttaccccgaaaatgtccgcgagctttacgatatacaggcctgtcctgcttcttttgctgctttctctccccatcagcatgttatatgcacaaacagaaacaacatacaggctgttcagcaaaaacatgttttctgattatctgtccatgctgaccatctattcagcagcaaaagctttattcagctgtgttctccaagtacctcttgtcaaagggaccgaaaagctttcaataaaaacgatcctcttcattacttatatttgctactcccttgcggctgccggttttgcatgctcaacctccctgataatgcttttagtgacggcagcgatgatgacggttggcgaaagcatcgggctaacccacatccagaccttcatatcaaaattggcgccgcctcatttgctgggccggttttatgctgtctatggtctgcattgggatatatcccgctcaatcggaccgctggcaggcgggctgatcctgacatcatttggcggagaagtgattttttacgctcttgccgtatgtctgctgacagcgggtttatctctgacttacacaatagagaagctcgaacacaaggtcataagaaaagtgaatcgcttatagaaaataattcataatttctttatcaacaaaaatatactatagtaataaatacattcactacgtgaacaattggagtgttacgtgaaaaaggaagaagggttttacattgaagaaagacgaaaatctcctcaaagatctatggtttatcgcaatcagtgcagccggggggtttattctttcattaaccggaatatcaattggatggatgatcggaacactgattgtcgcctgctgcctcgccatgatacggccggcatggctgatgatggcaccagaccaaaaaggaattaaccgacgatggctcgccctcgggcagatgatcctcggcatcgaattgggccaaaagctgaatttatccgttctctctgttctcaaagaccattggttttcagtcggcgttatgctgatattgtctatcctgctggccatgctgtcaggatatgtgctttggcgtttcagcaaaacggatatgatgactagctttgtcggcaccgctcccggcgggctttccgccatgccgagcatcgcacaggaagtaggcgccaataccgctatagtcagcctcgttcaaatgatgcgtgtgctgctcgtggtgctttccattccgtttttagtcattctgatctatacaaaacaagatcgtaccgcaagtgccgcagcagagacgatttcttctgcaacgacagattttaggctcgctcccgttttgtggaccgtcattcttattctcgctgcctggggagcttgcaaagctgcgaaatttttaaaatttccagctccatggctgctcggcagcatgctcggtgtagcaattgtacatgttggcggagctgcggtgacagggcacgacatgacggcatggtggccgtcacaagctaaccatgtatcacaagtatttctcggggcaacgatcggctctaagatgtacaaaagcatgtttgccggcgtcacccgtattatcatcgtcgggtttgtctcgtccgtcggtttaatcgcagcaatgtttttgagcgccgtgatcgtttccgagctgacaggaatttcgctcatcacttctgttctggcatttgcgcccggcgggattgcagagatggcgacgacgtcagttaccttacacgctgattccacctttgtcgttgcggttcaggtcattcgcgtcattctggttattgccctgctgccgccgttttatcgtctgcttcaccatcttcatggtgaaaaaaaagacaaaaagagctcaatcagcggcagtagtgcctagttgaaaaaaaggttcaagaacttttaattcgcaaaccatcgagatggggaaatataagcggatatttcgttgttaatggatcaggtttgaagtgagtgctgccagagggtgaaatgaaagaaataattgacgacttacgattgaaaaagaggttaaaatgaataacctctttttcttatataaagatataaaatgataaagggaaatctatcgttacgttgattctcttataataagctttgttggcagtttaataattcttctgtttaaagtggcattacccgaaatggactcgatgattttcaacacagcctgttggcctaattctattacggggatatcaattgttgttatggtcggagtaacgacttggcagatcaattggttgtcaaaaccaattacagctaagtcttctggaactttaaagccatttttcatcgcctgtttaataatccctgcggcgacttgatcatttcctgtaaatattgctgagggtctgtcctttagatcctttatcttatgaaaaacacgaaagccatcctcgatattaaacatttcgccgaatatccattcgcttctatgatgtaaattgtaatcttgtaaagctttcaagtaaccctctttcctctgacattgagcttcgctatatggagtatcaaaacaaaacccaattttatcatgccctctttcaattaaatgtactacccccatgtatgcggcttcaaattcatcatacccaattatcgtgatgtccgctgagtgatgatattcattacataataagataggaccatactttaagaaaggggatatctgatcccattcattttctaaagtcccaagaataatgccatccacttctttatgcttcaataactctagtaattctagctccgtctgtttgtcataaaaggtctgaaatacaattaccttgtaattcttaaacagtgcttcatgagagaccccttttattaattgagcaaaaaatggatggtcgatactcggaaccgataaagctatcgtttgtgtcttatttctcctaaaattccgagctaaataattgggagtgtagtcaagttcgttaatagcctttaagatcatatctcttttttctttcgacacataaggatgattattcaatactcttgacactgtggttttagacacattgcataattttgctatttcatcaattgtaggcatattttcccttccttaaaaaagttgttgacatgttaccgatttcagaaactaggataaatttgtaataaatttttagattataaaatcattggaggtactgttcatgcaaaaacaggttaagatttcaggtaaaagcaaagaaaacatgtcactattaaaacacttaaaaggtgacgtacaaggaaaagaacttgttattgaagacagtattgtaaacgagcggtggaaacaagtattaaaagaaaagatagatattgaacatgatcttttcaactatcaaaaaaatcgtgaaatcagtaaagtcccttttttgcctgtagacagattaataaccaatgatgaagtggaagatatcttaaatacattaactgaagttttgccaactggaaaatttacgagtggttcctatttagagcaattcgaaaaagttttatctacatatttacataaaaggtatgtaattgcaaccagcagtggaaccgatgctattatgataggtttattggctttaggattaaacccaggggatgaagttatcatgccggctaatagcttttcagctactgaaaatgctgtgttagctttgggaggcgttcctatctatgtagatattaacccacaaacattctgcatcgatcctgacaaaattgaagaagcaataactccttatacaaagtttattctacctgtgcatttatacggaaaacattcagacatgcagcatattcgtcaaatcgcaaatcgttataaattgaaagtaattgaagatgcctgccaaggaattggactgacagacttaggaaagtatgcagacatcactacattaagttttaatccctataagaattttggtgtatgtggcaaggctggggcaatagcaactgataatgaagaactcgctaaaaaatgcattcaatttagttatcacggttttgaagtaaatgtaaaaaataagaaagtcatcaattttggatttaattcaaaaatggacaatttacaggcagcaattggtttagagagaatgaagtacctttcattaaacaacttcaaaagattgttcttggcggatagatacattacccaattagcagagttgcagaataaaggctatattgaattaccagaattaagtgaagatcatgtatggcatctgtttcctattaaggtaagaacagaagatcgggcagatatcatgactaaattaaatgaagattttggtgttcaaacagatgtatattatccaatactgtctcatatgcaaaaaactcctttagtacaggacaagtatgcaggactccaattggttcatacggaaaaggctcatagtcaggtactgcatttgcctttatatccgtcatttactttagaagaacaagacagagtaatggagggactgtttcatgttattaagcaagaaatcggagtataaaacgttatccacggttgaacatcctcagtatattgttttttgtgattttgatgaaacgtattttccgcatacaatcgacgaacaaaagcaacaagacatctatgaactcgaagactatctagaacaaaaaagtaaagatgggaagctaataatcggatgggttactgggagcagtatagaatctattctcgataaaatgggaagaggaaaatttagatattttccgcattttatagctagtgatcttggaactgaaattacgtacttttcagagcataacttcggtcagcaagataacaagtggaacagtcgcattaatgaagggtttagtaaagaaaaggttgaaaaacttgtgaaacagctacatgaaaatcataacattcttttgaatcctcaaactcaattaggaaagtcacggtataagcataacttctactatcaggaacaagatgaaataaacgacaagaaaaacctattagcaattgaaaaaatctgcgaggaatatggcgtttcagtaaatataaatcggtgtaatcccttagcaggcgatccagaagacagctatgatgtagattttatccccacagggacaggaaagaatgaaattgtaacgtttatgttagagaaatacaacctaaataccgaaagagctatcgcatttggggatagtggaaatgatgttcgtatgttacagacagtagggaatggatatctgctaaaaaatgcaacacaggaagccaaaaacttgcacaaccttataactgatagtgagtactcaaaaggaattactaataccttaaaaaaattaattggatcatgaggaggaaataaaaatgaagaagataggaatcataggtgcaggtggtattgcaagagcgcatgcaactgctttatctacaataaaaaatgcagagttagtaggggtatatgacataaatcaacaaaatgcggaaagctttgtgaaaactttcggcgggaagtcatttgaaaacgcagatgaactaattgatgcctcagaaggtttaattgtagcatcaccaaacttttgccataaagaatatgctttgcaagcattaggaaaacataagcatgtattgtgtgaaaagcctatggctatttctcttgaagaagcaagcataatgaaagataccgctgaaaggttgagcgtaagagccagtatgggatttaattatagatatttatcttacgtaaatatcttaaaaagcttaattatcaataatgaactaggtaacatactgtccataaaagtacacttcaagaaaaatagtgcacttagacgtaagaagtttacttggagagatgacgctaatagtaagaaaaccagcgggtcattgggggatctgggtattcaccttattgacatggtatggtatttgttcgagagtgatttcatcacagaatcagtaagggcaaagatgaacacaaatgtaaaaacaaaagaggataaacaggtacttgtagatgactatgcagaaatttatggccagctgaagaacaaggtatttgtaaatatcatcacatcaaaatgttctgtacctgaagactgtggttttagcattgaggtagttggacacaaaaaagagtttaaataccacacaggtaatcctcacgtttacaagctcatagatggcttgaacgtggtagactgcccagtaccgcaaagcctattaaacgatccgccaaacgagttttatggatgggctgattcttttagaagcgagttaatcaattggattgcatcaactcagaatgattgggttgagatcccttcttttagtgatggttttagatctcaggaagtgttagaaatgttctttgagaaagacagcaactctcaaccaaggtctgtttcagcagtcaactagtatttcaaagagagaagttactaaaaaagcaggaatttactttcctgctttttcatataggggtgtaatgaatgttaagagggacatatttatttggatatgctttcttttttacagtaggtattatccatatatcaacagggagtttgacaccatttctattagaggcttttaacaagacaacagatgatatttcggtcataatcttctttcagtttaccggatttctgagcggagtattaatcgcaccgttaatgattaagaaatacagtcattttaggacacttactttagctttgacaataatgcttgtagcgttaagtatcttttttctaaccaaggattggtattatattattgtaatggcttttctcttaggatatggggcaggcacattagaaacgacagttggttcgtttgttattgctaatttcgaaagtaatgcagaaaaaatgagtaagctggaagttctctttggattaggcgctttatctttcccattattaattaattccttcatagatatcaataactggtttttaccgtattactgtatattcacctttttattcgtcctatttgtagggtggttaattttcttgtccaagaaccgaaagtacgctaagaatgccaaccaacaagtgaccttttcagatggaggagcatttcaatactttataggagatagaaaaaaatcaaagcaattaggcttttttgtattttttgctttcctatatgctggaatcgaaacaaattttgccaactttttaccttcaatcatgataaaccaagacaatgaacaaattagtcttataagtgtctcctttttctgggtagggatcatcataggaagaatattgattggtttcgtaagtagaaggcttgatttttccaaataccttctttttagctgtagttgtttaattgttttgttgattgccttctcttatataagtaacccaatacttcaattgagtggtacatttttgattggcctaagtatagcggggatatttcccattgctttaacattagcatcaatcattattcagaagtacgttgacgaagttacaagtttatttattgcctcggcaagtttcggaggagcgatcatctctttcttaattggatggagtttaaaccaggatacgatcttattaaccatgggaatatttacaactatggcggtcattctagtaggtatttctgtaaagattaggagaactaaaacagaagaccctatttcacttgaaaacaaagcatcaaaaacacagtagaaaacgtataaaataaagatactaatagacatatcgtataagcagtgcaaattcctgaacatcttgaatttcattcttcaagaggaaatctgatttacgttacagccttgaaaaagatagaaacaaagcgaaaaacacgcaccgcagtgcgtgttttttatttaaaaatgctaggaagccccccttcaatttcttctgacgacggataccattttgtcaccagatcccgaaacagccgttccgcaaaaagaatctcttcctcggtatagcggtcaaaaaatgacagaaaacgctgttcagccttctgatgataatatttgtgcaaactgtgcagcttttttccagcaggcgtcaatcggaagtagacctcctttttattatcgctgagctgtgttctgtgaaggaatcctgcgccgagcaattttgtgctgatgcgtgatacagtcgcttttgtcgtattcattttttctgctatcgacgtgacattaattggttcattgtccccgacacaggatagaacatgaatttctgtcatcgtcaattgagatttactcccgtgctctacatccagcttccccaattcgtcagataaaaaggctttaataagcccctcccatttctcctgctgatgaatgagctccgcatacaattcaaaaagattgcgtttcgtatgatctgtgttcatcgggttttccatcctttttcattcgattgtttcttctatcataccgttttgttacagatgaaacaatcgaattgaattatattcggctggtgacggaaaaccagcggctgatccctttttgaatcacctcggcacaatcgggcgctgatgcatccaccgcccaggctacatgtccatcgggacgaaccaatatggtatgcacatcccgcaacttttcattcggttctgcaagcgaggcggttaccgtacgtaagcctttcacttcgatatgctcatcagcttcctgcctcaatgacagcaaaacgaatgacccgttttggaaaaagctgtacagccattccgaactgccgtcggaaagaatcagcttcatgtcagggagccgtgccccgttcaaacgattcggcggcatggtacgatcagcttcatatctgacatcgagtgcagaaatttgccctgctacatatcgattcacatcagggaaggccagcagctccgacatcatgcttcgcaaatggaggcctgcttgagtgaaatcgatcagctttgtctgtgcctccgtgtttctgaggagcccttccgctgccggatgccgctcgtcatggtagctgtccaaaagccatgaaggcgcagagcctttgatggccgccgccagtttccacccaaggttcattgcatcctgaagaccgacattcagtccttgcccgcccgccggaaaatgaatatgcgcggcatcacccgcaagaaagattctgccgtcccgataccgtttcgcttggcgcgcggcgttcccgaaccgcgacatccacgaagggttgcttaaaccaaagtcagttccgcaaattcgcaggaggtcagctttcagctcttcctcagtcacaggcacatctttcggcgtttgcgtgcgataagggctgatcacaacgacacggtatcggtctggagataacggaacaatcataacaccgccctcttttgtgcaaagggacagcacgcctgacggcggcggagaaaggagcaccacatccccaagcgcagcggtgacagtgctgtctgttcccggaaactcaatttttgcctgtttccggacggtacttccggcgccatctgccccaacggcaaacttgcttgtgatcgtccgtacactgccgtcccgatccttaaaaatcgtttggaccgcttccccgttttgcgtaaccgccagcgcctcggcaccccgaaacacctctgttcccaggcttcgtgcatgatcttcaagaagcttttctgtttttgactgcgggagcaaaagcgtgtaaggacagctcgtatccaagcctgaaaaatccagacgggtatccagcattgaaaaatgtccggaaggtatcttgcttcccttggatacgaaccgctctaaaatccctctcatctcaaggagctccagcgttcggggatgcagcgtcaatgccttggaatgcggaacaggtttttcaagccgttcaatcacacatgttcccactccggccatcgcaagctcagaagccagcataaatccgaccggccctcctcctataatcactgcttcatatttcatcatcattcaccactccttttgtttcatgaaaaacgaacaaaaaccaataaaaacggccctctaatcaaaaaatatataaattttgttacataggtaacaattttgattatatctccttacaaatttttcttcaacacatttttccaaacggcatacaaaaagacgcctcttcaattagcgtctttttattcggcatcagaaatcacaccgacaatatttttttctcttatcggaccaaaatgccggctgtcgaagctgtatatgcgattatctccaacgacaaaatattttcctttcggcaccttgcttgttcccgtcacatctttcaaagaaaaatcacccgttacatggctgccggcagaaacagatttcaaatgcttcaaaaatggctcagcaacctgctttccgttcacatacagctgatcatctttatatttgatcgtttcaccgggcaagccgattacccgtttaatcagcactttatgatcagggcctttaaaaaggacgatgtcaaagcgatggatggttttaaatcgatgcgaaaatttattgaccaacaattcgtttccttcctggaaggtcgggttcatactgacgccttctaccttgtaatcaataaagacagcatttttaacctgaatggcgagaacaacggacactacaccggcaagaaaccaaaaccgttttttcatgttactgtctccctccatcatgctcacgctgactggctcttacatgcagataccgctccacctttttgccgacataccataagacagtgatcaccaatacggcgatgaccgttcgaatcggctgtgtaatcagcgcgtgcagatcatatccgatgaagctgatcataaaaatcatgacaagcttccccgaggctgccgccaaaataaacggccgcgttccgatccttgacaaaccggcaacaacattcaccgcggctgacggtgtaaatggaaaacaaagcagaagaaacatgggaccgaagccgtgtctttccacccataacatcagctttctgacagacggatgactgcggataaatccaagcaattttctctgtccgtattgacggacaatcaaaaagacgagaatggaaccagcagttgatcccgcccaggataggatgaatccttcccacaagccaaacgagttcgtattcgccaccacaaacacgatcagcggcaaaaacgggagaaatgcttcaattaaaggcagcagcacagcaatgagcggaccgaaagccctatagctttgaaataattcagttaaatgttcttgtgtcaaataggataaaaaatgctccaacatttatactccttaccgggtttgtctatccttattctacacattatcagcagaaaactaaaaagttttggtgattttttctgtcttgaaacatttcaccagccgatatagaatacaaatagaacaaacgttcccttagaaagaaggagtcaatatgccaaatctgcaggaggaaatatacgatttaattgaacgggctctctttttgcccatggccattacgatttttaaccgtgatctcgccggaattgaagaaagcacattaaaattgaagcatccttataaacagcttatcagcgaatcattaaaaatagcacaaaaggatttgatggaggtcagaaaagaactgaggaaaagaaaaattgcaatccgcgagacggaacgcgatgaggcctttacactctatacatttgtcatcgacggttatgaagaaaaccatcgctattttaatccgcgaatccgtgagcaggtcagcgaattattaacatactatctatttgccccagacagactctgagccttttgaatcatactgcccgttccctcttcgggcgattcagagcattaatttcagacaattcacactatacaaacaaaataaatttatttataattcgaaccacagcctttcactccaaaaaatgacatgtgctgcgatatctgcgacatcattctcagtacgcttaggcttgtacacctcaatcctaaatagaaggaggattctatgaaactgattcacgttcttgccgctttgccctttatcggaatcttactcggcatcccttttgcaaataaggtgaccccctatgtgttcggcatgccgtttattcttgcctatattgtgatgtgggctcttttgacctctgcgctgatggcgattgtgtatgtcctcgacaaggaaaataaaaaggaggaagcagaatgaatgcagctctcatcatcatcttcggtgtcctgctcttgagtatttttctcggtatacgcgcccaaaaaggaaaagacatgaacctggagcagtggacggtcggagggcgcggcttcggaactgttttcgtcttccttttgatggcaggcgaaatttatactacttttacgtttctcggcggcagcggctgggcctacggaaagggcggtccagccttttatatcatcgcctacggatgtctggcctacatcctttcttactggcttcttccagcagtttggacgtacgcgaaacagcataaactaatgtcgcagtctgattttttcacaaaaaaatacaacagtccgctgcttggcattctcgtttcactggtcggcatcgccgcactcattccctatcttgtactgcagctgaaaggcctcgggctgattgtatcggaaacctcgtacggcaaaatcaccccgaccgctgccatctggatcggcgctgtttccatcacggtttatgttatggtttcaggcattcacgggtctgcctggatatcggttgtgaaggacatcatgattctggttgtcgttctgtttttaggtgtgtatttgccaattcattactacggcggatttcaagacatgtttcagcagattgaaacggcaaagcctggctttcttacgctccccgaatcgggacaaagtgtggcctggttcagttcaaccgtactcttgacagcgcttggtttttacatgtggcctcacacgttttccgcttcgtattcagccgaaaacccaaaagtctttcgtaaaaacgccatcatcatgcctttgtaccagctggtcctgctctttgtccttttcgtcggcttcgcggctatcctgcaagttccagatctgaatggcgcagacggggatttgtcgcttttgagactgtctctgcaagcatttgacccttggtttgtcggaattatcggtgctgccggactgctgacagcacttgtgccagggtctatgatcttaatgtccgcctccacactgtttgcaaaaaatgtgtacaaggtaatcgcgccccgcacgacagaacagcaagtatcggctcttgctaagtttttagtgccggtgattgcgttgatttcggtgtattttaccttcaaaggcgggaataccatcgttacgctgcttttgatgggctacagccttgtcacacagcttttccccgcccttttgttcagcctgttcaagcataatatggtgacaaagcaaggagccttcgccggcattattgcaggtgtcggagcagttacttatattacaatgacggaaacgacgatcggcactttatttccggctctgccgcaatccgcaaaagacttgaatgtcggcatcgtcgccctgcttttgaatatcacggtcatgatggcagtcagccttatgacaaggaaggcgaaaagtgctgcggccgatcaggcggcttaagcaatagaaaaagcaatctggtcatcagattgctttttcttgtttaccgttcacaggcgataagatctttatcgcggtctttatttttattggcatcataaaggtccttagagacgtaaggcttgtacttcgtttttccgcctttgtttttcaccttcgatgtgcgggccactccgcctttgtatactttgtttaactccttgcagttcttatagaccttcacctttgttttggcttccgccacatggtcagctccgcatgaaaaaccgaaaacgagaccgagtgacagcaaaaccgccgccgcttttttcatgacgattcactcccccaacacccaatatttagttgatttatagctcgaatttatcataattcatatagtcttatttgacaagataaatatggaagaaggctttgttttttcttgttttctttttccttcactattcaaactgccaaaacatgtttttctgcttatgctcaggggtacacatacgaatgtacaccaaacagaaaaggagcgttgctgatgtctgattcaaatcttacgaatcctataaaagcattttttcatgatgaatttcccgaacaatatcaagaaccgccaggcctgcaaaagaacatgaagcctgtccctgattgcggagaaaaaagctacaaaggatcaggtaaactaacgggtcgaaaagcgcttgtcacgggcggcgattccggtatcggccgcgctgccgcgattgcttacgccagagaaggtgccgatgtggccattaactacttgcccgaggaacagccagatgctgaagaggtaaaagagctaattgaagcagaaggccgaaaagcagtgctgatccccggagatttgagcgacgaatccttttgccaagatctagtcaaacagtcgcatcacgaactcggcggacttgatgtgctagcgctcgttgcaggcaaacagcaagcggtcgaaaacatcgaagatctgcctactgaacaaatctataaaacatttgaagtgaacgtcttttccctttactgggttgtaaaagcggcgcttccgtatttgccggagggagcttcaattatcacaactacctcagttgaaggctataatccaagcccgatgctgttagattacgcagcaacgaaaaacgccattatcggctttaccgtcggactgggaaaacagcttgcttccaaaggcatcagagtaaattcagttgcgcccggaccaatttggacaccgctgcaaatttccggcggacagccgacggaaaacatcccgaaattcggacaaggcacgccgccagctccattaaatcgcgctggacagccagtggaattggccgatgtttatgtatttctagcttcagagaattcaagctatgtgacatctcaggtatatggcatcaccggaggaattccgacggcatagctttatgaaaggagctgccctgttcggtcagctccttcctatttttctaataccgttccccgagctcacgcaaaataaaatcataaatcatcttcgtccgctcttccttcgggtacagcataaattcctgccttttcggcacgcggtggtcgattctgtcttggaatttggttctgagccacgctgttcgatatacctggttctcgaacgaattataagagatcggcagctccatcgttttcccattcgaaaacgtcacttccgtatcgtcgaattcagtcgctttgaattcttttacatgcacatgggaaatccagccgcattggggtcttgtcgaagaaagtgtagggaataaaaagatttggttcgaagggtccaccatgatcggcggcttgtgtgaaatttttgtcacttcataagttcctgcttttcttcccgcatagcttgatccaaaaaatcggcagcttctgtcgacaatttgcagcggcttcatgtttacataaaacacgcaatctttttcaataattctggaacagattttgccgtctatttcttctggcagcacggcaattgttgcgccgttcacttcatacgattctaaaggtgcgtctgttttctgactcatattatggcctccatcctttttctgcaaaatttatactaataatctatcatctgtttttgtaaaacgacaggtttttttaacatttaagataaaatcatcttttaatgatatttaatggtactaaatgactagtaataaaccgattttactttcataagacttgccggtttacggcattttgcaggatatgtcgatagattgccaagtattagttgtctaaaaattataaaaatttattgattttttcgaccgttatccatatactataaaaaaggcattggggggattctttatgaaagagaaaaaatcgtacactgagctcatgaagtcccgcaacacgcaaaaaacaaaagaattcgatgtcacaatgacggatatttacattcaaatggtgctcgatgaatccttgtataaccgtcggcttgccatgctgacggaccaaattaacaaagccttggacgaaaaagataaagatgcgtttcttacgctctctaaagaatatgcagcgctcaagcagagcgaataagccaatccttcaaggattggctttttattatccgttcacaattgttccgccattgacgtgaatcgtctgccctgtgacgtatgtggaatcgtcgctggcaaggtatagatagcttggcgccacttcgaccggctgccccgggcgttccatcggcacgtctgaaccaaacacttccacgtcttttgcggcaaagctggccgggataagcggtgtccaaatgggacccggtgccactgcattgacccgtatgccctgctgaacaagcgactgggaaagggaccttgtaaacgtaacgatcgcgccttttgtcgctgaataatcgatcagcgttttattgcctttataggcggtaattgaagcggtattaataatagagctccctttttttaaatgaggcagcactgcctttgttaagtaaaacatggaaaaaatgtttgtttggaaggttctgatcagctggtggctggtgattttttcaatgctgggctggacatgctgctcagctgcattgttaaccaatatatcaatggatggaaacacttggcttgcctgcccgaccacatcattgcaaaacgcttcatccccaacatctcctgcaatcagcaggcattttaccccttccttttctacatactgctttgtttcctcggcgtcctgatgttcattcaaatacacaatgaccacattagctccttcttttgcgaataacaccgagacagcgcgtccaatcccgctgtctcctccagtaataatagcggttttgccctctaattttttcgctttcttcggcttatcaaaaaccggacgcgggtccatcagatattcaaaaccaggctgctggttctggtgctgaggcggtaatgttttctttttttgattcgccaatgaaatcactccttttcaaccttattatgttatgaacaatgcctgcttcctatgtatgaaaagatagaatatggaaaaattaagaataaatctgattggaggtataacggcttggctaatcaacattttgcaaaggaagcacctgaaacatactggaaaacatcaactgacctgccttcttttcctgcgcttcaagaggacactgaatgtgacgtcaccattatcggaggcgggattacaggaatcacaacggcatatgaacttacgaagagaggcttccgtgtcgttttgattgaagcaaatcaggttcttaacggaaccactgcgcatacaactgctaaagttaccgcacagcatgacatgatatacgacgaatttatccgccatttcggattaaaccatgcgaggctttattatgaagcaaaccaaaacgcaattgattacataaaaggcattgtggatgaacatcaaattgattgtgaatggatcgagcaagacgcatatctttatacggcaaatgaaaacgctgttcaaaaaatccgcaccgagcatgaggcatacacaaagctcggaattgaaagagaccttatcaaggatcttccaattcccttaggttctaagctggcgcttgtcatgaagaatcaagctcaatttcatccgcttcaatacttaaaagcgcttctggagcaaattgttcaaaaaggcagccgaatttatgaagagaccgttgcgcttgatatcaaaaaaggcgaaaggcccgaagtggtaacaaaaagccggcacgccattaagagccgctttatcatatgctgttcccacttccctttttatgacggaggcggattatatgctgcgagaatgtactccgacagatcttatgtccttgccatcaagccgaagatcgagtatcccgagggcatgtatttgagtatcgatcagccgtcagtggcgctccgctatacggttgtaaacggtgaaaagctgattctcttcagcggagtaagccataaaacaggccagggaaaagccatgtctacacattatgaaacactgagacaactggccgaaagcaccatcggcatcgaaagcattccatattattggtccacacaagatctagtgacgatcgacaaaatcccgtttatcggaccgatgtcggaaaatgaggacaatattctagtagcgaccgggttcaaaaaatggggcatgacgtcctcagcagtcgcagccactctattgtcagaccttgtggagaaaaaagacaatccatacgaaagcattttcactccgtcccgtttccatctgaatcccgggttgcagaaagtgatttcctacaatgccgatgtcgccaagcatttgattaaaggaaagcttgaaaagcctgatgtccaatttgaagacatttcgccaggagaagggaaagccgtcaccataaacggcaggcgagcgggagcatttcgggatgagacaggctgcctccatctcgttgatacgacttgtacccatttaggctgcgaggtcgagtggaacgacagtgagcatacgtgggattgtccgtgccacggatcacgctttaagccatctggcgaagttgtagagggtccggccattaaaccattaaaacaaatagatctcgattaaaccgttcattttaatgaacggtttttcaaatatttttcatctgcagcttcattcatgtttctcttggccgataaaaaagaaaaaggcttaaaaagccaaaaagtaaaaattatatttttcccaagggggatcattgtattgttatttaaaaaagacagaaaacaagaaacagcttacttttcagattcaaacggacagcaaaaaaaccgcattcagctcacaaacaaacatgcagatgtcaaaaaacagctcaaaatggtcaggttgggagatgctgagctttacgtgttagagcagcttcagccactcattcaagaaaatatcgtaaatatcgttgatgcgttttataaaaaccttgaccatgaaagctcattgatggatatcattaatgatcacagctcagttgaccgcttaaaacaaacgttaaaacggcatattcaggaaatgtttgcaggcgttatcgatgatgaatttattgaaaagcgtaaccgaatcgcctccatccatttaagaatcggccttttgccaaaatggtatatgggtgcgtttcaagagctccttttgtcaatgattgacatttatgaagcgtccattacaaatcagcaagaactgctaaaagccattaaagcaacaacaaaaatcttgaacttagaacagcagcttgtccttgaagcgtttcaaagcgagtacaaccagacccgtgatgaacaagaagaaaagaaaaaccttcttcatcagaaaattcaagaaacctctggatcgattgccaatctgttttcagaaacaagcagatcagttcaagagcttgtggacaaatctgaaggcatttctcaagcatccaaagccggcactgtaacatccagcactgttgaagaaaagtcgatcggcggaaaaaaagagctagaagtccagcaaaaacagatgaacaaaattgacacaagccttgtccaaatcgaaaaagaaatggtcaagctggatgaaatcgcgcagcaaattgaaaaaatcttcggcatcgtcacaggcatagctgaacaaacaaaccttctctcgctcaatgcatctattgaatccgcccgcgccggagaacacggcaaaggctttgctgtcgtggcaaatgaagtgcggaagctttctgaggatacgaaaaaaaccgtctctactgtttctgagcttgtgaacaatacgaatacacaaatcaacattgtatccaagcatatcaaagacgtgaatgagctagtcagcgaaagtaaagaaaaaatgacgcaaattaaccgcttattcgatgaaatcgtccacagcatgaaaatcagcaaagagcaatcaggcaaaatcgacgtcgatctgcaagcctttcttggagggcttcaggaagtcagccgcgccgtttcccatgtggccgcttccgttgattcgcttgtcatcctgacagaagaataaccatcaaaaaccggtctgccatacggccggtttttttgcgtctattatgtaaacttaaattaaaaatcagttgacataataattgcctgcatttattgtataaccatatttgattactgtttggaggatttcacatgctgaaattaatcgacatgatgcatattgcgattttcaccgcactgatggcagtgctcggctttatgccccctctcttcttatcctttacacccgttccgattacattgcaaacgcttggtgtcatgttggcaggcagcatcctcaggccaaagtctgctttcttaagccagcttgtctttttgctgctcgtcgccttcggagcgccgctgttgcccggcggacgaggcggttttggtgtgtttttcggaccgagcgcaggctttttgattgcttatcccctcgcttcatggctgatcagtttagccgctaacaggctgcggaaggtgacagtatcgcgtctctttttcactcatatcgtattcggcatcatctttatttatctgcttggtataccggtacaagcttttatcatgcatattgatttgtcacaggccgccttcatgagccttgcatatgtgcctggtgatttgataaaagcggctgtatctgcatttctggcgataaaaatcactcaagccttgtctctttctgatacgatgtttacaaaaggaggatgacactacatgacaattacccatacctattcatctaccgccgaaacatcgcccggccgtgtagcgatccagactgaatcggagcaaatcacgtaccaagattgggatcggcttgtctttcaaaccgcaaattggctgcggtcacagccgagcatgccgaatcgtgtggcgatcctgctcccaaatagtctggcgtttttacagctgtttgccggagccgcagcggctggatgtacggcaattcccatcgacacacgctggagcgcggcagaatgtaaggagcggctgtccataagcaatgcggatcttgtggttactttagccttttttaaaaacaaactgacagatagccagacacctgttgttttgctggataactgtatggcagatatttctgaggcagccgctgatcccttgcctaccattgatccggagcaccctttttatatgggatttacgtcgggctcgacaggaaaaccgaaggcctttacgcgatctcaccgctcatggatagagagctttacctgtacagaaacagatttttcaatttcatcaaatgacacggtattgattcccgggacgttaatgtcctctcacttcttatacggggcagtcagcactttgtttctcggaggaaccgtttgtttgctgaaaaagttttctcctgccaaagcgaaggaatggctgtgccgtgaatccatcagtgttctctataccgtaccgacgatgacagacgccctcacaaggattgagggttttcccgacagtcccgtcaaaatcatttcatccggcgcagactggccggcagaatccaaggagaagcttgccgctgcatggcctcatctcaagctgtacgatttttacggcacatcagagcttagttttgtgacgttttcttcaccggaagacagcaaacggaaaccgcattcagcgggccgcccttttcataatgtccggatcgaaatccgcaacgctggaggagaacgctgccagccaggggaaatcggaaaaatatttgtcaaaagcccgatgcggttttccggctatgtgaacggcagcacaccagatgaatggatgacagtggatgatatgggctatgttgatgaagagggctttctatacatatcaggaagagaaaacgggatgatcgtgtacggaggattaaatattttcccagaagaaattgaacgtgtgcttctcgcctgcccagaggttgaaagcgcggctgtcgttggcattcccgacgagtattggggagaaatcgctgtagctgtcattcatggaaacgctaatgccagaacactgaaagccttgtgtaaacagaaattagcctcctataaaattccgaaaaaatgggtgtttgcagacagcttgccggaaacgagcagcggaaaaattgcccgttccagcgtgaaaaaatggctggaagagagtatacagtataaatgaatgcggttattgttgatgcaaaacgaacgatctttggaaatcaaaacggactgctgaagcccttcctgccggaggatttgtcagctcccatcatccgctgtctcagccgaaagctagaggatcaaattgacgaggtcattctcggaaacgctaccggcagaggcggcaacctcgccagactgtcagcccttcaagccggactgcctttatcggttcccggaatgacaattgacagacagtgcggctccggccttgaagctgtgcgctatgcctgcagccttattcaagcgggagccggcacgatgtatatcgcgggcggctcagaaagcagcagccaatcccctttttcagaacgggcccgcttttctccagatgccatcggcgatccagacatgggcattgcggcagaatatacggctgcacgctattccatcagcagaagcatgcaggatgagtacgcgcttctcagccatcaacgcagcaggaacgcgcatgatgaaggattttaccgtgaagaaattgttgctcttggggaattggagatggacgaagcatttttgaaaacgcggccgatagaagcgattattccccgtgcaaagccggttttcgacaccagctccggaacagtcacagcagccaacagcagcggcatagcagacggagcagccgctcttttggtaatggaagaagaaaaagcggcagccctcggacttaagcctgtgcttcggtttatcggcagcgctgtcagcggcattcaccccaactatccgcccgcggcaccggttgatgcgatccgtaacctcttacatacacacgatgtaacacctgaggatatcggtttatttgaaatcaatgaagcctttgccgtcaaaatttgtgtctgctcgcaagaactcggcattcccttttcaaaaatcaatgtgcgcggcggcgccttagctcttggccatccgtacggtgcatcaggtgcagctctggtaaccagattgttttatgaagcgaaaagacggacagactgtcaatatgtggttgcagccatcggaagcggcggcggaattggacttgctttattatttgaagttcttgcataggctttttcataggacacacgctttcgatttagtataatagcgatatgaataaagtcaggaaggggattttatgacagccgtttgtttagtaagacatggagaaaccgattggaacctgcagcaaaaatgccaaggcaaaaccgatattccgctaaacgcaacaggtgaacgccaagcaagagaaaccggagaatatgtaaaggacttttcttgggatattattgtgacgagcccgctgaaaagagcgaaaagaaccgcggaaattattaatgaatatctgcatcttccgatagtcgagatggatgattttaaggaacgcgattacggcgacgcggagggcatgccgctggaggaacggacaaagcgctatccagataacatctatccgaatatggaaacgttagaagaactcactgacaggctgatgggcggtttggcaaaagtgaaccaggcgtatccaaacaagaaggtgctgatcgtggcgcacggtgcggcaattcacgccctgctgacggaaatatccggcggtgacccggagcttcaaagcacccgcctcgtcaacgcctgcctcagcaacattgaatttgcagaagaaaaatggcggataaaagactataatatcaacagccacttatccggctttatcaaataagaaaaagacaggcgtttgcctgtcttttcttttatttcttagcagccgtcatctctttttgaagctcgtccaaaatggcattcgccccgtctacactgcggcgcagagaccacaccgcacgatccacgtggtatacatgcccgtttttcactgccttcagttttttccaaaggacattcttttcgatcgggcgtttaccgtcggcgtcgaggtcatctgtttttcctgtcatcaggatgatcacatccggatctgttttcagcagctgctccagtgtcattttcatattcacagagtcgccgccattgcttgaatcgctattgcctgacgtactgattgcatatcgatagccgacctgtgttaaaagtctcgatgtaaagaagttttcatccctggccataatcgtatcatttgtatttccgatcaaaagcacggactggctgttcgcgctgattttctgctttgtctcgctaagcttttcttcatgcgccgtcagctttttctccatttccttctccttgccgactgcttttgcaatcgtaagcgaagcgtcaattgtatcctgataatcagcatttaaattattaagcgcaatcgtcggcgctatttttttcagctgatcgtacaccttcttatgccgggtcgtgtcagcaataattaaatcgggttttaatgaagcgattttttccatgcttggctgtgagcgagtgccgacagatgtgtagccgtcaattttcttcagcacatccttgttgatcagctgcttcgctttgttgtcatcggcaaccccgacaggcgtaatgccgagatcaagcagtgtatcaataaaacctagctcaagaacaacaacccgcttcggatgctcaggcacatttgtcttccctaaatcatgtgttaccgccactttatgttctttactgttttgattgccgcttgaagacgagcaagcagccgttaagacagaaagaagtaaaactgtaagaataatcagtgtttttttcatatgttccagtctctcctgttggtagtttctatggttaagatgtccaagagtagtataacacggaatgagaatcattatcaccaattatttttaaaatgagaagagaaagttcggcttacaggaaaatcttgtttcgcgacacagcagttcagcagctgatcatcctgtccacaaaaaagcttgcagaaaaataacattctctgcaagctgatcctgttaaagcttcacaatcactcttccttgaatgcgattttgcaaaatatcttttaacgcacccggcgtttcttccaatgatacttccctgtccacgatggtcagcagctgatcaggcttgagatcagaagacatgcgctcccaaacagcggctctgacgtccatcggacaatatactgaatcgattccgagcaggcttactccgcgaagaataaaaggatacaccgttgccggaacttctcctccgccggttaagccgctcactgcgacagatccgccgtattgaattttgcttaaaagcgaggcaagctgttttccgccgactggatcaaccgctccctgccattgctgcttggacagcgccttaagcgttccgtcatagacatcttccctgctgattacttcgcttgcaccaagctgtttcaaataatcagccgcctcccggtttccggtacttgccaccacatcatagccccgcttgttcagcatcgataccgcaattccgccgacaccgccagttgctcctgtgactagcacgctgcctttttccggagacagaccgttctgttcaagccgatgcactgataacgccgcagtaaatcccgccgttccgtacaccatcgcttcttttaacgaaagattctgtggcaaaggcaccagccagtcaccaggcaccgaagcgtattcacttaatccgccatcacgggagacaccgagctcatagcttgtcgcgatcacctcatccccctccgcaaaacgcggatcattggaagagacgaccgtacccgcagcatcaatgcctaaaataagcggatactctctgacgatattgcctcctgcttttccggccagaccatctttgtaattgatgccggaataagcaactttaatcaggacaccatccttcggcaaatcctctgttgatatggttttcacatggactgaaacatcataggcatttttttctgcctgcaatgcttgaaataacgttgacattcggcacactccttttcatttatatcgtaaccgaagaacgttcaaaaaaccaaatcatcaagccgccattttcacttcgccggcacattgagacgataatggacaaatccggtatcctcttcatagccgttttgctcatacaagcttcttgccttccggttgtggtgctcagtctgaagtgttaaacattttgccccgttttcctctgcataatcctttgcggcagaaagaagccggccgccggctccctttgtacgcgcatgaggaacgacaaataagtcatttaatatgtagatccttttcattgacacagaagaaaacgttggatagagctgggtaaagcctatgaattctccattttcttctgctatcaaaataacagactcgtgattttccaaacgagctttcaaaaaagcctctgccccttgcaaatcggatgcctgtctataaaattcccgatattggttaaacagcggcgcaatggcggccgcatctgatgtctttgcttggcgaatgttcatcttatttcttcctccctctcaataattttttcattctatcccttttctgtaaagtttatttttcagaatacttttatcatcatgctttgaaaaaatatcacgataatatccattgttctcacggaagcacacgcaggtcatttgaacgaattttttcgacaggaatttgccgggactcaggagcatttaacctaaaaaagcatgacatttcagcataatgaacatttactcatgtctattttcgttcttttctgtatgaaaatagttatttcgagtctctacggaaatagcgagagatgatatacctaaatagagataaaatcatctcaaaaaaatgggtctactaaaatattattccatctattacaataaattcacagaatagtcttttaagtaagtctactctgaatttttttaaaaggagagggtaaagagtgagaagcaaaaaattgtggatcagcttgttgtttgcgttaacgttaatctttacgatggcgttcagcaacatgtctgcgcaggctgccggaaaaagcagtacagaaaagaaatacattgtcggatttaaacagacaatgagtgccatgagttccgccaagaaaaaggatgttatttctgaaaaaggcggaaaggttcaaaagcaatttaagtatgttaacgcggccgcagcaacattggatgaaaaagctgtaaaagaattgaaaaaagatccgagcgttgcatatgtggaagaagatcatattgcacatgaatatgcgcaatctgttccttatggcatttctcaaattaaagcgccggctcttcactctcaaggctacacaggctctaacgtaaaagtagctgttatcgacagcggaattgactcttctcatcctgacttaaacgtcagaggcggagcaagcttcgtaccttctgaaacaaacccataccaggacggcagttctcacggtacgcatgtagccggtacgattgccgctcttaataactcaatcggtgttctgggcgtagcgccaagcgcatcattatatgcagtaaaagtgcttgattcaacaggaagcggccaatatagctggattattaacggcattgaatgggccatttccaacaatatggatgttattaacatgagccttggcggaccttctggttctacagcgctgaaaacagtcgttgataaagccgtttccagcggtatcgtcgttgctgccgctgccggaaacgaaggttcgtccggaagctcaagcacagtcggctaccctgcaaaatatccttctactattgcggtaggtgcggtaaacagcagcaaccaaagagcttcattctcaagcgcaggttctgagcttgatgtgatggctcctggcgtatccatccaaagcacacttcctggaggcacttacggtgcttacaacggcacgtccatggcgactcctcacgttgccggagcagcagcgctaattctttctaagcacccgacttggacaaacgcgcaagtccgtgatcgtttagaaagcactgcaacatatcttggaaactctttctactatggaaaagggttaatcaacgtacaagcagctgcacaataatagtaaaaagaagcaggttcctccatacctgcttctttttatttgtcagcatcctgatgttccggcgcattctcttctttctccgcatgttgaatccgttccatgatcgaaggatggctgcctctgaaaatcttcacaagcaccggaggatcaacctggctcagccccgtcacggccaaatcctgaaacgttttaacagcggcttctctgttctctgtcaactcgatcccatactggtcagccttattctcctgataacgcgagacagcattagaaaaaggcgtcaccgcaaagctcaaaacagaaaacaaaagcaataacagcggaagtgccgcaagatcatgccgtccttctaaatgaaacatgctgcgggttaggcgaaccgtccgcttgtaaagcttatcaatgacataaaatccggcgagcgacacgagcaaataaccagccagaccgatgtaaacgtgcttcatgacataatggcccatttcgtggcccataataaacaggatttctgaatcgtcaagtttgttcagcgtcgtatcccacaatacaatccgtttattggccccaattcctgtaacataggcattcagcgcatttgttttttctgacatgttcacttcatatacatggtcagccggaatattggcttcatctgccagctctaaaattttgctttcaagctctttgtttttcagcggataaaaatcattgtataaaggatcgataatgaccggctgaataaaaaacagaaacagcgaaaacggcactgttaacagccaggcgtataaccaccattttttttcatgccttttgatcagccaataaaaaacgagaacgcaaagcgtaaagattggaaagctgatccaaaagctgataacctgatccttagcccagctggccgttgtctgtgtggaaatgttatagtcaagcgatacttgatagcctatccaatctaaaggcagcgtcaccaatgttgtaatcagcgaaagcacaaacacaaaaccaacggtctgcaaaaaccgaaaaggcacggccgcttcgatccatttcttgattttctttgaaacaccgctgacaagcagaacaaaaaacagaaaccaatcaagtggtaccccgataaaaaataaaaaattcttgacattcgaatactgctcggccactgccaactcagacggcttcatgaaagaagccggatcagcctgcgtccctttcacggcttccggtattgcggaatcacccgacaggaaaaaataccaataaaaaaacagcccgtacagcacgtaagcaagtcctgctgccgcaatccacttgcgcataacgcctcactcctcacatcaacccgttacttctattgtaatcataaattcaaattcttagaaccaagctgtgttccgcacttttccacccttttaagcatggaaagcccgatcgctgggaaaactaacaatgtttggagtgatgcaaatgaaaaaaatagtggcagccatcgtggtaatcggtcttgtgtttatcgcatttttttatctttacagccgatcaggcgatgtgtatcaatcggtagacgcggatttgatcacactgtcttcaagcggccaggaagatatcgagattgaaaaaagacagcacgtcaaagatatgctggatattatgaatcagggaaaacaggtgaagacagaaaaaacatcagcccctgattacgaagggacaatcaagtttcataaagaccggtatgactcattcagactatggattgacggcagccagcaagccgtttttttgaaggatggcacatactacaaattaagcaaaaatgatacaaaggcgctgctaaatattattaaaaaagaagcaaaggattgaaaatgaaaaagcgaagctaaccgcttcgctttttcattttattggggcaaaatatctctcagtgcccgtctgagcattttccccgtcgcatttttcggaatatcgtcaagaaacgtaatggcggcaggccgcttgtattttgccagatgcttttcacagtgctgcatgatgtcctcctctgttaccccagagcgtttcggcaccacatatccctttaccgcttccccgctttgggggtccggcacgccgatgacaaccgcctccttgacgtccggatggctgtacagcacctcttccacctcccgcggatacacattgtatcctcctacaatgatcatgtcttttttccggtcaacaatgtaaaaatagccgtcctcatcccgtcttgccaagtcccccgtataaagccacccgtcttttaatgcatgctctgtttccatcggcattttataatagcccttcatcacattggggcctttcacgatcaattcgccgacctggtgagcgggcagctcgcgtccgagcggatctacgaccttgttttcgacatgtaagatacttgtcccgatggagcccggctttctgcccctgtcaaacgggttaaagcacgtgacgggtgatgcttccgagagcccgtagccttccaaaatggtaacaccgaatttttcttcaaacgccgtcagcaacgcgactggcatggccgcgcctcccgaaatgcacagccggatggaagaaaaatcatctttctttccgttttcatgctgaaacaagtagttatacattgtaggcacaccggcaaaaatggtcgcctgctgctgcttaacaagcttaaaaacagatgccggactgaattgaggctcaatcaagacagttgcgccgctcatcagcggtgcattcatgcagacggttaaacaaaacacgtgaaacatgggaagagcgcagaccacattatccctctcatccattcccaaatagcctgcgacatcgttggcattgctgtacaaattctgatgagtcagcatcgcgcctttcggttttccagtcgttcctgacgtatataaaataaccgcggtatcatcagggacaagttcttggttttgtttagcggcagatgtcggccgcaatatttttgcaaacgttgtcattttcatcctgacctctgggtccgcagcttccggctcggcctcccccgtctggcataaaatgacgagctcaacctttggcagcgattcatgcatgctctcataaagcggcaacagctggctaacgcccacgatcgcctttacatcaccatttgtcagcatataaccaatttctgtcggcgtgtacaacggattgatgggaacaaccacgatcccagcttttaaagcgccaaaaaatgcgatgataaaatcaggcgaattgccaagcagcaaagctagatggtcccctttctccattccggcttcctgaaggccgtccgcaaatcgctgaatatgttcattcagctcttgatacgtcatcatgtgatctttaaacctgcatgcgatgctgtcgggcttctcagatgctgtttcttccaattttgaaacaagattcattctcccaccccttaaagtgaatgaatagtcattcattattgaagccaagctttctcctccattatagagaaacagaaaaaaacactcaagagcaaaaagccctgagtgtcagtactgtcatagtttcttcaatgcttcggcaatcggcgtatctccttctgtcagatcaaaggcccgattttccgtattcttctcatctaaagaagcaatgaccgcttttgccacatcatcacgggaaataaatccccgctccagatccttcgctgctgaaacagttcccgttccaggctcattgcgaaggcctcccggacggataatcgtataggttaaaccgctcgcttccagaattttatcagcataatgcttggccacataataaggtttgagtgcctcattccaattttcacggttatgggcttgcagggcgctgaccataataaaccgtttgattccggcaatgtccgcagcttcaatggctttcgccgctccatcgagatccaccagcagcgttttatcatagcctgtgctgccgccggaaccggctgtgaaaatgatcgcgtcacaaccttttgccgcagcggcgatttcttccgggctgctctccagattcgcaagcacagcttctgcaccggcagcttcaagagacgctttctgttcttcttttctgaccatcgctctgatggaatgatcaggattatcttggaataaagagacgagtctttgtccgatttgtccgttcgctccgattaaaaacactttcatgtgaatccctcctgcctccattatttcaaaaacacaaccgctctttcaaacgatgtgttttgccttaataaatcagatcaaggaaatcctctttcgtaatgttcccaaagtaatgcttgagattcacaccttcgagcacatcagcgatgacgctgcgttcgtattgttttccaaccagcaggttttcaatttcagatacatcaccgacaccgaagaaatctccgaagattttgcagtcctcgattttgcctttcttgacctctaggcgcaaatcgatcgatccaaccggataacgtttcgaatgattaaggttaaatttcggcgagcggccgtagttccaatcccaattctgatagcgctctttcgaaatttgatgaatggtctcccaatctttttccgtcagcttatactccggcacgtttccaatgtcgtttgtgttaaaaatatggcgaagcaaatggctgcggaattcttcggtggtcattttatcatcgagaaactcactgatgtttgctactcggcttctgatcgatttgatgccttttgattcaattttatcctttttcacctttaatgctgatacaacatgatcaatggctgaatcaaacatgagggtgccgtggctgaaaatacggcctttcgttgcaaactgagcgtttccagatattttccggccatccactacaatgtcgttccggccgcttaattcagcttcaaccccaagctgatgtaacgcctgaatcaccggctcagtgaattttttaaagttatgaaagctgtccccgtcatccttggtaataaagctgaagttcaagttccccagatcatggtacacagcgcccccgcctgataaacggcggacgacgataatcccgttttcctcaacatattttgtattgatttcttctattgtattttggttttttccaatgataatagacggttgattcacataaaagagcaaatattgctgttcagggtctaaatgctttacacagtactcctcgatagcaagattgatccgcggatcattgatattttgattgtctataaataacatggtgctcctcctttatccttcccacacaaaacctgatttcgcaattttcacttctccgttaaaaacggttttcgcttctttgcgaaggttgtcatgcacgccaaaatgcggcaaatgtgtcagcagcagttctcccgctccggcttcttttgcaatgcgcccggcttccaggctgttcatatggcctgcacttgttccgtcttgatcggcataaaaattgcattccgagatcaataaatcagcatctttcgaaaacggtataaatgaatcctgatagctggaatcagcagtataaacgacagtgtggctgccgtcagtaatccgcatggcatagcacgtcaccgggtgaattgtttttaaaaaggtgatcgtaaacggaccggcagccagcggctgatccggctgataggcgatcccttttgtatgtgttttatatgtaagcttttgaaactgttctatatcagcatcatgtccgtaaatcggaagcgtatgctctcctttgccgagaaacgaaccgacttgcttggcaaattgcagcggcccgatatcagcgatatggtcatggtgataatgagacagaacgaccgcatccagcttttccgccggcacatatccgaacagcttagacaatacggcactgccgcaatcaacaagcagagagtaatcacctgactgaaacaaatagcctgacgtcgcttcatttgcggccggaaaaccgccatagcatccgataactataactttcataatgtcctcctatcttttcaaaaaaattgatcctccttcaatatacccatttttcttgaaaaaagcatgttttaaacattgtatcaaaacagttattgatttttgcactctgttatattacaatgaaatcactacaaaggggaaagagggattggttatgctggggaaaatcacagaattttttagaaacctgccttcgaaaaagtgtgcggaatgcggaaaaaagatagaagagcagcatgagtgttatggtaatatctgcaatgactgtataaaagtaaacgatttgtaatgagcgaaaatcccgcgccttacgcgtgggattttcttattttttcacatatctcttaattttgaaataatagtcaggttaggtcaaagctcacctgtttttagataattctggtgattatcataatgtcattgaatattctttattttcgaaatataatttactatagacgaattgatttcttatctattataatttgatctaatagtgagattaaatatatgtctattcatgatatatgttgatactttgttttttgggaggtaatctatgaaaagaattaagtttggattagccacacaaatattcgttggacttattctaggtgtcattgttggcgtcatttggtatggcaacccagcattgcctacttacctgcagccaatcggggatctctttttacgcttaatcaaaatgatagtgattcctattgttgtctccagcttaatcatcggtgtagccggtgcaggaaatggaaagcaagtcggtaaattaggcttcagaacgattctgtacttcgagatcatcacgacttttgccattattctcggactagcccttgcaaacatcttccatccgggtacaggagttaatatacacgaagctcaaaaatcggacatcagtcaatatgttgaaactgaaaaagaacaaagtaataaatcagtggcggaaacgttcctccatattgtgccgacaaacttcttccagtcattggtcgaaggggatcttctagccatcatctgctttacagtactatttgcattgggtatttccgcgatcggtgaaagaggcaagcctgtattagccttttttgaaggtgtatcccatgccatgttccacgttgtaaaccttgtgatgaaagtggcgccattcggcgttttcgctcttatcggagtgactgtgtctaaattcggactcggttctcttatctctctcggaaagctcgtcggattggtttatgtcgcgcttgctttcttcttaattgttattttcgggattgtcgcaaaaattgccggcatcagcatcttcaagttccttgcttacatgaaggacgaaatcttactggcgttcagtacgtccagctctgaaacggttcttccgcgtatcatggaaaaaatggagaaaatcggatgtccgaaaggaattgtttcatttgtcattccgatcggttacacgtttaacttagacggttccgttctctatcaatctattgccgcactctttttagcacaggtatatggcattgatttgacgatttggcaccaaattacgcttgtgctcgtcttaatggtgacatctaaagggatggctgccgtgcctggtacttcttttgttgtcttgcttgcaacgcttggcaccatcggcgttccggctgaaggacttgcctttattgccggcgtagaccgcatcatggatatggcacgtacagttgtcaacctgactggtaacgcgcttgctgccgttgtgatgtctaaatgggaaggcatgtttaatcctgcgaaagcagaaactgttatgtcccaatcgaaaacagaacaaaacgcaaccatttctggttaatgaaaagcctgcggggttcttgccccgcaggctttttttaatctttaacaagcacaaacagctctgtaatcaaaacagtatcctcattcagctccagttcaccgcttttgatcagttccgcccatgccatccgatggtcctcgtgaaactccgcaattcggtctccgttgccctctcctttgactaacctcatatcaggcgcaccaaaggtggtttcaaagacatctgtcacttttatattgcatcttggattgtcatgtttatcataaacggtaacaagctgacccgctgtttgataaacgtccctcaattcatcttttgaatataatgatttcggcgcgcacgtagcggttttttctccagcaaggatctgctgaatcagctgttctcccaacccgtcatcaccttcccagccgaatgtgcttttcagcttataaatcttcattggtcttcccccttataccattggtgactgtacatagtaatacagaagcttagcggtatggcgaagagatgatttatgggtgcgttcaaatgcatgggaagcgtcaattcccggccctatgaggccatgtacaatatcatgcccggatttgatcgctgctgacgcatcagacccgtagtacggatatatatcaagcttatagtcaatatgatgcttctcggctaattgaactaaatgctttctgagctgataatgatacggcccgctcgcatccttcacacagattgatacagaatattcatctgtcgcctgcccgtcaccgatagcccccatatcaaccgccaaatattcaactgtttcaggaggaatattcgaattcccgccgtaaccgatttcttcattattggaaataagaaaatgggttgtatacggcagctcaatgtcttctgtttgaatttcatgaattaagcggagcaataaggcgacgcttgctttgtcatccaaatggcgcgatttaataaatccgcttgatgtgatctcgacacggggatcaaacgacacaaaatctccgacgccaatgccaagctcctccgtatctttccggcagtgaacaggttcatctaggcggatctccatattctcttgattccgctcagcctttcccgcgtctttgtatacgtgcacagacgtttgatgcattaagattgtgcctgtgtacgtttttcctgaggcggtttcaatttggcaatactccccctcaatcgagttgtagcggaacccgccgattaaatcgattttcagccggccgtccgctttaatttcctttaccatagcgccgagggtgtcaacgtgcgcagtcagcatgcgatgccgggatgtgtcgcgtcctggaagcgttgcaattaagccgcccttgtggttccgaaccgtttctaccttccattcttttaaaaggctttcaatataattgatcacctcatatgtatttccggtcgggcttgggatcgataccagttctttaatgagctccatcgttttacgtacagacgtcatagggcattcctccttttattttctacttaaaatatactcttttcccgagggacccgtccaatcttttcctatcaatctctcatatgctgtagagagcatgggaagaggagggatttctatgtgctgtcgtcattcacatgaacagaaatgtcgttgtcacgattggttcgatgatttttggttctttgacgagtggttcgataaagatttccacgaccattgcaagaaaaagaaagaatgccatgacccttgcgagaagaagaaaaagaaacaccattgtttctcttgtaaaaaacacagacattcttgctgtcattgtaaagactgaatcagaaatattctgatgacccatgcttaatgaatatttccattcacatttttccaagcgggcattgctgctgcttggaccttttattgaaacaccctttttgcttttacaatccaataaactgataaagccgctataagagcaataatgatttcaacagctgcagcatgctctatgattcctctctgatataaaaccgccggtacattaaacagtgcatgtaaaagaatagaatacaacaaaaacagcggccggcggcttttaaccgcgtacaaaacaagcagagacagcccaatttggacggcaatggcactgactctttctattccgcccagcatccattcatacgaaggagtatgcagcagctgctcctgtatcggcaaaagcgcctgtttgacgtcgccattgaccaaaagctgttcaaacgtcccgctattgattgcaaatgcgtatacaataagtgagatagaggacaagcctgtaatcaggatggcttcaagcccgccatggcctgccccgaaagccagaccatccgcccaagtatgatggcgcttcataaaaaatcgcatcatcatataccttccgcactcctcaaaaattccggccatcaagcagccgtaaatgccataccataatggatgttgcatcgcttctttcgtcatttcattcacttgcagtacataaacatgaacgccgccttccagcagctgagcgaagacaaaaaacgtgagagcgccaataaaaaacactttaagcgaggcgccatactttcgcttaaaccatacaatcagcccgattggcaacagaaacgcaatagccccggataatgccaaaaagactactgcttcttgactgaccatttttcagcctcctttttctttttcatagattccctattctacacttctctttttttgtaaaaaaaccttctttttagtaccagatactaatatctagtgttataatctgacataaggagtgattcatatgtcaaaagcaaaaattacagctatcggcacctatgcgccgagcagacgtttaaccaatgcagatttagaaaagatcgttgatacctctgatgaatggatcgttcagcgcacaggaatgagagaacgccggattgcagatgaacatcaatttacctctgatttatgcatagaagcggtgaagaatctcaagagccgttataaaggaacacttgatgatgtcgatatgatcctcgttgccacaaccacatccgattacgcctttccgagtacggcatgccgcgtacaggaatatttcggctgggaaagcaccggcgcgctggatattaatgcgacatgcgccgggctgacttacggcctccatttggcaaatggattgatcacatctggccttcatcaaaaaattctcgtgatcgccggagagacgttatcaaaggtaacggattataccgatcgaacgacatgcgttctgttcggcgatgccgctggtgcgctgttagtggaacgagatgaagagacgccgggatttcttgcgtctgtacaaggaacaagcgggaacggcggcgatattttgtatcgtgccggactgcgaaatgaaataaacggtgtgcagcttgtcggttctggaaaaatggtgcaaaacggacgcgaggtatataaatgggccgcaagaaccgtccctggcgaatttgaacggcttttacataaagcaggactcagctctgatgatctcgattggtttgttcctcacagcgccaacttgcgcatgatcgagtcaatttgtgaaaaaacaccgttcccgattgaaaaaacgctcactagtgttgagcattacggaaacacgtcttcggtttcaattgttttggcgctcgatctcgcagtgaaagccgggaagctgcaaaaagatcaaatcgttttgcttttcgggtttggcggcggattaacctatacaggattgataattaaatggggaatgtaacaaaaaaagaacttgtttccaaggaaacaagttctttttctttatgaagccggctgttcttctgatgtttcttcctttcggcttaacattgtaaagtaagtaatgcttagtgcaatcatgacgagggcgatgccgattaagacgccggccatctgccacatgtagccaaagtcaccgtttgaaatgaccgctctgaatccgttaatgctgtaggtcatcggcaatgcgccatggatgacctgatagaaattcgggagcaattcaagcgggaaggttcctccgctcgctcccagctgcagcactaaaataatgactgcgataaaacgtccagggttgcccatcgttgtagccaaaaattgaatcatcgccaggaaagcgagactcgtaatgattgtaaacacgtaaaatctccacgtgctctctacctcgagaccaattcccaatagaagaaccgtcgccacaatcaatgattgaatgattcctacaagcatcatgacattgaatttgctgaagaaccactcaaaaccgtttctcggacgtcctgacgcttccttcagcgggaagacaaccgtcagcatgatgccgccgacatacaagcccattgacaggatataaggtgtcagccctgttccatagttaggaacggaatgaatggcatcatctttggttttaaccggatccgcaaacatgccatatgtttgatcatcagcatcgatatctcctgtttgatcagccgcatccttcagcttactagacagctctcctgtgccgtccaatagcttgcctaaacctgtatcaagtgatgcagatccgtctgcaagttttgatgatccgctttggacctgtttagacccgtctaacagcttaaacaatccgccggatacttggctgcttcctgtcaccaattgctctgagcccgcttttgcttttgcgaactgcttattatattcaccgatacccgctgtcagtttagtttggccatctgtcagcttctgtgaaccattgtatatcttatcagctccctcagttaatctgtcaattgcatcttggattgtttttgcgccgttataaagcttagatgtagcttccggcatggctttcacctgcgccacctgcgctttcacgtcttcaagagagctttttatcgttgcgatgtcaggcagctgatcagctgaaggaagcccacttaaaatttcatcaaaatcaggcgcatcaactttcggcagctgcttttcaacagagctgatcaactggcttttttgctccgctgttaagaaatcactcgaattgatgagatttttgaatgcctgatcacggttttttaagctgttttcaaagtcagacagctgttttttaaattccttcatcgcagtttctgatttttccagattgtttacagcagtttcaagcttcgttaaatcgagcgcattaatgagcttttccgcttttgctgctttctcagaaccttcttgggctttactgttgagctgatccagcccgttagtaagattaggcgcacccttctgcacattttgaagtccagcaagaagttcattcatcttgcttgtcagttcgcctgatcctgctgcaagctgactagatttatcataaatctggttgctgctgtcctggaatttaccgagcgagctatcaagtgattggatgccgctcgtcacctgagccgctccatctgcaagctgcgctgttttgtcactgatggtagcggtgctttccttcagcttcgccagattttctttcagctgtgcgcttccgtttttcgcatcctttgtgccgtcatcaatttttttcgcgccgctgctcgcgtcgctcaaaccttttgcgatatctttaaagttatcaaaaataactttcgtatattgctctgtcacttctttagaaacagaagctttcagtttatcaatcgctttttcaccgatcgttgcccctacatagttggaaccggcatttgtatggtatttcagatccaatttttttggatttttgtccaacacggtgctggcattcttagaaaaatcctcaggaatctcgacaactaaataatatttttgattcaataagtcctttaacgattggtcgagatcattggaaaaatgccaatcaaagttgttattatcctttaattctttgaccagatcatcaccgatttgaagtttttctccttcatacgttgctcccttgtcttggttgacgacaacgacaggcagctggtcaactgtgccgtacgggtcccaataagcctttaagaatacgccgctgtaaataagcgggacaaacaaaatggcgatgatgggaatcaataattttttacttgttacgatgtctttccactgacttcgtattgtgttcatcctgatgcctccattctaaaactgactcatcatgaaaaatggtcattttcttgcaaagagaaaggattatctagttcgctgacaatcctttgacaacatacaattcaagcagtcccgcaattgtctctttatcaagcggggggtgttgtttttcccagtcaaaaatgagcgcgatataaagcttcagcatcacaaaggctgtcagttcagggtcgcacggcttgattgcgccgcttttgatcccgtcttcaatcttacttttgatataagacagtatggctcgctccattttctggatcacttcctgaactgccattgtaccaatctcggcattctcttggaaaattttaatcgtcagctgatgtgttttcctgaactccagaatggcaaacagcgctctgtgcacattttcatggaacggaaggttcggctccatcgcttcatccgctttttgcttcatttcctttaataaagtagtgaaaatctcgtcaaacagctcttctttgtttttgaaaaaagtataaatggttcccttccccacgttcgcaagttttgcgacaagatccattgtcgtcgctttatacccgaactgcgtgaaagactttgtagccgcctccaaaatgagcttttttcgatctattgacattgtattcacctcgaaactgaccgtttgaacattttagtcattaagtacatatgcaaatgtatcataacctgctgttcaattcaatcatttttttacacaatattgccattgcacatcaaaaaaacctccgcgataaagcggaggttttagctgaataaataggtaagcgcgtcagacacggcagcttttccttgatcaatgcagtcgggaatgccgacaccttcgaaagaagcgcctgtcatataaacacccggatacgcagatgcaagtgcttcacgcagctccttgatacgctgcttatggccgacatggtactgcggcatgctttcatgccatcgggtgacacatgtcatttccggctcgccgtttatgttcatgactttctttaagtcttctaacacaatgttgataatgtcattatctgatagatcgacaatggattcgtctccagcttttccgacatatgcccgaagcagcgttttgccttccggagctgcgtgcggccattttttattcgtccacgtacaggcagtgatcgcaaagtcactgtttcttgaaataacaaaacccgtgccctcatgctccatctcgacggagccttcagggaaacctaaagcgacatttgccaccgatgtggagtgcatatttttcaaatgagaaatggcaggaagctcagaaagcattcccgcagccgctttatgcggagcagtcacaattactgaatcagcatcaagtgtgacgccgttatccaattcgagcgagtaaccagagccgccacggctgagcttggtcacttttgtgcctttatacaccttcgtcagctttaactgcttttcgatctcttcaacaagggtttgcaatccggttgacaaagtctggaactggccttgcttctttgccgtcagctgctggcctgagccttgaggccttgtttttttcatgccgagaatcaggcttctatgcttttgttctgtctggtaaaattgcgggaatgtcgacatcaggctgagcttgtcaatgtcgcctgcatagatccctgatagaagcggctcgattaagttctcgaccacttcatctccgacacgtctgcggaagaattctcccaatgactgatcatcctttgttttgcttgcaggcaggatgaaatccattgcagctctcgccttcccagacaaagaaaacagacccgtagaaacaaacggcgcaatttttgtcggtatccccattacagcgcccttcggcattggatgcagggtgcggtttacaagcacataggattgcccggtcgcattgttgacaagcaaatgctcaagacctaagtctttaacaagctgcggggcgcttttctttcgttccagaaatgagtctggccctctttcgatgatatagccgtccttcttgacagtctggattttcccgccgactctcggacttgcctcaacaagtgtcagctcaagcggcagattcttttctttgatttctttttccatatagaaggcggcggctaaaccggtaatgccgccgccgatgatgactacatgttttttgccgtcactcatgttcatcgccttctttaacgtcctaatttttttaatacgactgttgccaaagcatcaataaattcaggcttggcatttggcatttccggccggtaatagcttgcgccgatatcgtcagtaaccactttgcattcataatcattatcataaagcacttctaagtgatccgcgacaaatccaacaggaacatatacaaatgcttgatagcctttttgttcgaataaatcacgtgttaaatcctgaacatcgggtccgagccaaggatcaggcgtgttcccttcactttgccagccgacagcatattcggaaacgcctgcgccttcagcaattaatttcgccgattcatgcagctggtccgggtacgggtctccaaattctttgattttttccggcaggctgtgtgcggatacgataagcatcgcgttttctctttcatcctcaggcattgacgcatatgtttccttcactcggtcaacccaatatgtcacgaacttcggttcatcgtaccagctttcaactgacgtaatcgttaagccgccgagtttttcagcctcttctttggcgcgtttgttgtaggactgaacgctgaacgtggagaaatgcggcgccagcacgatgctgactgcttctgtaatgccatccttatgcatctctgctacggcgtcttcaataaacggctcgatatgcttcagtccgatatacgctttaaacgtaatctcatcctgaatttcattcaagtgctgttccagattatgcgcctgctcttctgtgatttttgcaagcggtgaaatgccgccaatcgcttcgtatctgtctttcaaatcttgaagcatttcaggttcaggctttctgcctcttctgatatgtgtataataacgttcaatatcttcttccttataaggcgtgccgtacgccatcacgagaagccccattttctttctactcactgtttacaccctctttaatgatctgatacaaacattttgacaggatatcattaagataccaaaagatatgcttaggaatattgacccatttttttgttttgtgaatattcatggacaaatgctgtcagttttttcaaaacctcgggactgacatcaggaaataccccatggccaagattgaaaatgaagccgtctgactccataccctgatcaagtatttcctttgttttcttctcaatgacttcccatggcgcaagcaaaatggacgggtccaggttgccctgcactgttttagtaattccttttgatctggcttcagcaatgccgagtctccagtcaagcccgacaacatcgagaggaaggtcatgccaatcacctgcaagatggcttgcgccaacgccaaacatgatcagcggcacattctcctttgcgagctctgaaaaaatccggttcattacgggtttgatgtatgttctgtaatctgcctgattcaatgcgccgacccacgaatcaaagatttgaatcgcttttgcgcctgccttaatctgcgctttcacgtacacgatgatcatgtcggcaagcttggacatcagcagattccatgcatccggcatgctgtacatgaaggcttttgttttattgtagtttttcgatgggccgccttcgatcatatagcttgcaagcgtaaaaggcgcacctgagaaaccgatgagcgggacgttcagctgctcattgacaagcagtttaatcgtctcaagcacgtacggcacgtcctgttccggatcaatctggccgagtttttcaatgtccgccagagaccggattggctgatcaatcacaggaccgaccccgtttttgatttcaacatccacaccgattgacggcagcggcgtcatgatatctttataaaggattgcagcatcgactccgtattgctcaaccggcagtcttgtgacatacgcacaaagttcgggctgatgtgtgatctcaaacaatccgtacttttccttcagcttgcggtattccggctgtgagcgccctgcttgcctcatataccacacaggcgtgtgatccgctttttctccccgcgcagcttttaaaaacgtctcgttaaacgtttctcgtttactcatctgatttccacctttcatacggcaaccatacgttcgtatttcttgacttattacactataccttgttttaggcaaatggtatagaaatgtagctcaaagttcaaaaaatcgccgaattccattaagaggaaaacaattttggctgaacgtaatcggttccttccccttctctttttgtctgtgtattataaggcacaattttataagacgcgcccgaaaataagttggcataaggaatttcatagcttcccttcccttcaaccgaatcaagaagcgtctcctcgccgtccttgtttacataaattctgtatacggcccgatcatcctcttgagcgtcccactttaattcaatagtaaagagccccgctgctttaaatgtgtaatcggctgtgagtgttttgaccggcttcagctcaatcgggctttccagttctttaacgtttttaggctttgtgaacacatgaccggtttctcctgcctgtgtcaaaatatccttaaacagccgcgtcgggtatgagctcccggctttcaaataatggttttgatccgttttgtcatagcccatccagactgccccggttattttcggcgtatagcctgcaaaccaggcgtcctttgtcgcgccggagacgcctgtataagatgtagaacctgtttttcccgccaggtcgccgtgataggtgccggacgtggccgttccctttttgactacctgctgcagcattctcgtcatattccaagacgtctgcttgttgaaaacccgctttccttcttctttataatcggctattgtttctccgtcttcatctattatgctcgagataaagaaaggttccgtatacgttccattcgcggcaaatgtatgaaacgcgccggcaagctggagcggcgaaacgcctttttccaagcctcctagagcgagagcaaggccttcatcagggatatcaatgccgtttgctttcaaataagattttcctgtttcaacgccgatctcattcagcgtccagacagccggcgcgtttttgctgtacgtaatggcgtcagacatagtgacttcgccctcataccggctgtcgtagtttttcggcgtataatctccgtaggactgcaactcatccttcaatagagaatatggcttaaatttcttttcctgcatcgccggtccgtatacggcaagcggcttaaatgtggaacccggctggcggacagctgtgacacggttatatcctttggatgtgtaatcccttccgccgatggccgcttctacaccgcctgtcttgttattaataaagaccgcgcttccctcggcattctgatctgttccgggataatagcttccctctttcatcacctggtaagccgtcttctgcagcttcgaatcgagcggcaccttgatcgtgtatccgccttgaagaagctgctctccggaaatggaatacttgtcttccgcctctttgatcacaaggtcaatgtagctgtcaaaccaaggtgtttccgactgtttcttcacgtgcagtccaagcgttcggccctgtgcggtgacagcctctttcgcactgatatagccttggtcattcatcatacctagaattgtatcacgccgctccttatttttatcagggtgcaaaattggagagtacgtagaaggcgccttcggaatagcggccaaaacagcgccttcagatacagtcaaatcttttacttctttattaaaataatagtgggacgccgcttgtatgccgtaaaccccatgtccgaagtaaagctgatttaaatacatttcaagcagcttgtccttgctgtaatcccgttcaagattgatcgcaatgatcacttcttttgtttttcttagaaacgttttgtcatgtgtcagaaaaatatttttggcaagctgctgggtgatcgtgcttccgccttccacctttccgcctgctaatatatcgcgatacactgctcttccgacagattttgcatcaatgccgtgatgctcatagaaccttttatcctcaacagcgataaacgcttctctgacctgctttggaatctcattgatcgagaccggctcgcgattttctgtatacaggcttgcaacctcatctccgttttgatcaacaatttttgaagaagcatgaagtatcagcttcttttcatctatgacataatggccgagaaaaataattgaaatatatcctattaaagcgagaaaagcagttaacactaaaataatgataggtataaaaagtttctttttctttatcttaaacatgaactcacctcgcctttctaaaggtagtatgggaaaaattgtttggaattatgttcgaagcactcgccaatagaaacttataccattgttttgatatactagcaagcaggaggtggctgatatgaaggtttatattacatatgggacagccgattttttaaaaacgatcgtagaaaagcatccctcagaaaatatccttttgatgcaggggcaggaaaacgccattttgattcatgaaacaaacggagataccgttttccaggcaccacacgcttatgaagtcattgaccaagtcggagagatcaaacatcccggttttgcagtattgaacaatattgccgtcactcaggaaggacgtccgctgtttgaaaacagatttaaaaacagagcgggaaaagtcgaaaacgagcctggctttgaagcaattcgagtgctccgtccgcttgacagtgacacctatgtcattctgaccttatgggaaacggaaagcgcctttcaagactggcagcagtccggttcttacaaagaagcccacaaaaaacgcgatacatctgctggaattgacacaacgtcgatcttctcccggccttcctatgtcaccacatatttcgctgtcgaatagctgccggcatgtccggcagcttattttattgggaggaaagcaaaatgaagcatacttgcccagtctgcgggtttaagggattggctgaaccgccatatgatcatgaaggcaatcattctcatgaaatatgcccgtgctgcggttttcagttcgaatttgctgattacgagatgcagcacgaggatgattcatatttagagccatcggaaagcaactggcttgctgaagggtgcgtcattttttctcctgaatgcttcccaaaacatctgcaaaaagcgaatagagtattaaggcatcatctgattgagcagctgaaacagatcaatgttcatcttccatcataaccctcccctctgtcccggcaccttccgcccgcctatgaataatctgtagcggaaggagtgatcgatgatggaagtcgggattttgtctgtccatgttctgtatgtgttttttatcggagtaattatcctatttatgctgctgagaaaagacacgacatttatttctctattcggcatttttatcatatcgctatgggccagccattcactttcagcttctgtcagcagtttgttccacagctttatctatgcggccggcgaactgctgcccacgattttcatcatttgctttatcgtttcaatgagtgatttgttaacaaaaacagggataaatgaagcgatgatttctccctttgcaagccttgtgagagggcctgtgactgcctattggctgattggaggcctgatgttcgccatttctctcttcttctggccttctccgggtgtcgctttgatcggcgccgtcctgctccccgcagccgcacgtgccggtttgacgcctcttgccgcggccatggccatgaacttattcggacacggttttgccctctcaggagactttgtcattcaggcggcgccaaagctgactgcagatgcagcaggcattccagtcggtgatgtcgtctcggccagcattccgcttgtgctgattatgggtgtgacaacaacaaccgctgcctttatcatgattcagcgcgaacgcaaaaaacaggagcctcccgcttctttttcccccgttctttccggtgaacaagacaactcgctgtacttgccaaaacgcctgcggtccatactggcttttttgattccgcttgcctttcttgcagatatcgcctgcatgctcttgtttaacctacaaggaaatgatgcaaccgcgttaattggcgggtctgcaatttgtatcctctttaccgttcattttttcgtgtataagcataaagggcttgaaaaaatcaccggctattttattgacggatttaagttcggttttaaggttttcggccccgtcatcccgattgccgctttcttttatcttggcgactcaggctatgaaagcatactgggcacttcactccctaaaggttcccacggcattgtcaacgatcttggcattgctttatcccatatgatgcctatgtcaaaggagcttgccgccgctgcattaactgccgctggagccataacaggccttgacggctcaggattttctggcatttctctcgccggctccatcgcaaagctcttttcgtccgctctccatgccgatcccgccgttctgaccgcgctcggacaaatctctgccatctgggtgggcggaggcacactggtcccatgggcgttgattcccgccgcggccatttgcaaagttgatccttttgagcttgccagaaaaaacttcattccagtcgcgattggccttttggtgacaaccctcgcagctgtgatgatgctttgaaacagcacgagttgaaatattcagactttttctatacaatcatggaaaagcatagaaaagggggaagcggctttgtccatatccacactgcagaaagagataaacaaacagctcgacggctgttttgaagaaatggttgagatcaggcgccattttcatatgtatcctgagctctcatttcaagaagaaaaaaccgccgcatttattgcttcctattatgaatcgttaggagtcccaatccgcacaaacgttggcggcagaggggttttagcatatatagaaggaagcgaacccggccctacagtcgctttgagggccgactttgacgctctccccattcaagatgaaaaagatgtcccttacgcctccaaagtgcctggtgtcatgcatgcatgcggccacgacggccacaccgcagctcttctcgcagtggccaaggtccttcaccaaaacagacatgaactgaagggaacttttgtgatgatccaccagcatgcagaagaatattatccgggaggcgcaaagccaatgattgatgacggctgtctcgaaaacgcggatgtgatattcggcactcatctttgggcaactgagccgctcggaactattctttgccgccccggcgccgtcatggcggcggcggaccgatttacgattaaagtcttcggaaagggcggccacggcgctcatccgcatgatacaaaagacgccgtcctgatcggttcgcaaatcgtttcctctttgcagcacattgtcagccgcaaagtcaatccgattcaatccgccgtcatttcgacaggctccttcatcgccgacaatccgtttaatgtcatcgcagaccaagcagtactcatcggcacagcgcgttcttttgatgaaaatgtccgggacattctggagaaagaaattgaagcggttgtaaaaggaatatgcagcatgcacggcgcgtcctatgagtacacctatgaacagggttatccagcggttgtgaaccatcctgcagaaacgaaccacttggtgagcaccgcaaagaataccgagggcgttcagcaggtcattgacggtgaaccacaaatgggcggcgaggattttgcttattacttacaaaacgtgaagggcacttttttctttacaggcgccgctcccgaacagccagagcgagtctattcccaccaccatccgaaatttgatatcaacgaaaaagccatgctgacagcggccaaggtccttgccggcgctgcgatcacctatcatcagctataaaaaaacagccggagtgtttattctccggctgtttcctttaatatcctcagatgaaaaacatgtcttgcagtttctccaagctgagcaagcagcttataattggcaattccgccgactgccgctcctacgcccggcaaaagctgaaaaagcttcacgacgtcgatataatcgcgatattcctgctggaacactctccagtcgatgctctttttctccgtctcccaattttcgatgacagaaaaaagcgatttacggccatcatcactcgaaaacgcaagctgaaacacgagcagcaaaaatatcctttcttgtgcatccttgacatcaaagccgtaaatggaagacaaggtaaataaacacttcatcttaattgaaagcagcagcggaaaatcagcaatgcctaaaaaaatgccgcccgctccggtgccgactccctcagcagctgccactttttgataagaaacaatcgtttttttcgccaattcgtttttttcactgagcgacagtgcacttgtatcctttttataggtgatgatattagagccggccattgtcgcttctaccatttttttcacactctcggtgacgaccgtatggattttttcaggaatccgttcattcaccttcgtctggacacgcttcgaaaagcgttcaaacatggaatcctttcgcaaaaaatgcattttccattccaaagcttcctgcatcagcagctgattatctgtcatttgattacctcttttcagttcacagctttccgtgctttttcagcctggtcgtcatataagcaggcaaaacaacaaaaatcagaacggcagaaccgatcagcgcgtacagaaaaccggtcaagccggctgcataggcagatgcaacagacatcagcagcgcttgaatactaagtgcagtttttaatagagagaaatagtttttcagctttgtttcttttttcacagggtacagctcttgaagcgccagatggtcaaagtggccaaagagcggcagaagctgaatgcccgtaatgaaaatggcaaacacagtcaaaacagctgcaatcagcgggctggctgagacatacataatgatcagcgcgaaaacgatcgttaatctgacaagaatgcccaaataatcgctcgaacgcaaaaaggcgcgggtgaacatataggcaaatgttttgcgctgttcaaacggcacaagccgcagcaaaaagtcgagataagctctgcgtttggcttgctttcgcaaatgcggcacatcagtaaacaggttggcaatccgatagaaacgctgctttcgtctcaattcggactcaatatggctctcccatttaaatgttttccgttttgctgcggaagacatatacagataaagaacagccataatgacatagacgagaagcgcatacatataaacagattggaaaacaaaataaagaacgagtgtattcgccgcaaagcgaatgatgacgtccatccgtttcatgctgcggtcgttttggaaagtcgttcgccattccattacctgattccacgctttcagcagcaacagttggacaaagaccgcggcatacgatacgagcgaagcccccggtgtgactgcgaaataaagcggcatcgcaacgatgctcagcgcaataagcggaaacagctgagacacatagctgtagacaaacgcctgcttcaagtaaggctccatttttgcttcaagaggcaataagaaaacaaggtcagcctccttcaaaagcgttcgcacataagagcttgtcaacacgagcgaaaacagcacggccatcacccaaaaggatggaaagtgagcgggaatgtcccgtatccatttgctgtaccagcttgcagcgcccgctagaaaaaaaatcaaaacaatgacgaggtgatcattgagcatatatttcatgtatgttcttgtttctttgatatgctcctgcagccgcgactgccaaatatcaagcatattattcatggccagcgtcttcctttgtaagctcaagatacaaatcgtccagcgccgcgtccttcattccaaactgctctctgagctctgacagcgtgccgcgcgcccgcacctcgccgttatgtaaaataataaacgaatcgcaatagcgttctgccgttgccaaaatgtgtgttgacatcagcacgctcgccccgccttttttcgcttcattcatccgttcaagcagcgcgttaatggcaagcggatcaagccctagaaaaggctcatcaataatgtagagcgcaggctctgccaaaaatgcgcacataatcataaccttctgcttcattcctttagaaaaatgggccgggaaccacttcagcctcttttccattcggaattcctttagtagcggaggcagccttttctccatcgtttcttttgacagtccatatgccatggctgttagttcaagatgctccatcagcgtcaattcttcgtataaaacaggtgtttcaggtatataggtaaattgtgaacggtagccttccggatcctcagcaaacgttttaccgtttaattcgattgaacctttatgcgggtccatcagcccgatgatgtgtctgattgttgtacttttaccagcaccattcagcccgattaatccgacaatttgattcggttcaagggtgaatgatacgttttttaaaaccggattccttgtatatccgccggtcaagtcttttaccgatagcagagacatagtttctccccttatagtgtttttcttcatagtaccaaaaacaaggcctgatttgaaacaattcccttttaacaaatgatgaatttgctgtcataaagagacagggttctggacatcataatagttgtagaggaaaagcatatcaactgaaaaatgaggtgtttgtcaaagacgtcttagaaacagttggatagaaaataaacatgtccaatgctcaaaccatttctcttcactgaattgatgaattcttcatgtatgaagcaaattgtcaaatgaggtgtttatcgcaggaatcgttaggcattaaacaagtcttcattttattgacaaatgaggtgcttaccaaaggcataacacattttcttcatataagctcttcctctgcattcagggtgaacgctcgccgttcatcctgttttctattttctgcatttctgtggtacgatgagtgtatacatactaaacaatttcataaggaggaaccctcatgcattgtgcagaaaattgtatcttttgtaaaattatcgccggcgacattccatccgcgaaggtgtatgaagatgaacatgtacttgcctttcttgatatcagccaagtgacaaaaggccatacgcttgtcattccgaaaacacatattgagaatgtatatgaatttacagatgaattagcaaaacaatatttccatgctgttccgaaaatcgcccgcgctatccgggatgaatttgaaccgatcggcttaaatacgctgaacaataacggcgaaaaagctggacaatctgtgttccactaccatatgcatattatccctcgctacggaaaaggagatggattcggagcggtttggaaaacgcatgctgatgattataaaccggaggatctgcagaacatctcttcctctatcgcaaaacgcctggcctcatcataagatgaggttattttattttgtgaacatttcgcaaacatccgtcaatttcttttgataattctaattttttatcaaaaaactgaatttttgtgataggataattgtattattttatacattaacgtggaaaacagggagagatcataatggaacgtacaacgaattttaacgcaggtcctgcagcgctgccactggaagttctgcaaaaagcacagaaagaatttattgattttaacgaatccggcatgtctgttatggagctttcccaccgcagcaaagagtatgaagcggtgcaccaaaaagcgaaaagcctcttaatcgaactgatgggcattccggaagattacgatatcttgtttcttcaaggcggggcaagccttcaattctcaatgcttccgatgaactttttaacacctgaaaaaaccgcacattttgtgatgacaggcgcttggtctgaaaaagcactggcagaaacgaaattgttcgggaacacgtctatcaccgctactagtgaaacagacaattacagctatattccagaggttgaccttacggatgtaaaagacggcgcatatttacatatcacatccaacaatacaattttcggcactcagtggcaggagtttccgaattctcctattccgctcgtagccgacatgtccagcgatattttaagcagaaaaatcgatgtgtccaaatttgatgtgatctacggaggcgcccaaaagaacctcggcccttccggcgtgactgtagtcattatgaaaaaaagctggctgaaaaatgaaaatgcgaacgtcccaaaaatcctgaaatattccacacatgtcaaagcggattcactctacaacactccgccgacatttgcgatttatatgctgagcctcgttctggaatggctcaaggaaaacggcggtgtggaagctgttgaacagcgcaatgaacaaaaagcgcaggttctctacagctgtattgatgaaagcaacggcttctataaaggtcatgccagaaaggacagccgctcacgcatgaatgtcaccttcacgcttcgggatgacgaattaacgaaaacattcgtccagaaagcaaaagatgcgaagatgatcggccttggcggacaccgttcggtgggaggctgccgcgcttctatttataacgcggtctctctcgaagactgtgaaaaattagctgcgttcatgaagaaattccagcaggaaaatgagtaaaaagtctggctatgcaaaccgtccgtttggtatactgtttgcataacacattctgtaaagccttcgcaataaatgatgagcatattattggagggcaaaaagcttagcagaggagagcatagttatgaaaacaaaagagttagtcattatggctctgtttgccgcaatcggcgcagcgcttcattccattattccgccctttttaggcggcatgaaaccagatatgatgctgatcatgatgttcatgggcattctgctgttcccgcgggtgcaaaatgtactcgtcatcgggatcgtgaccggaatcatttccgcgcttacaaccgcgtttccagccggacagatccccaacatcattgataaacccgtatcagcgtttctgttcttctccctgtttctcttgttcagaaagagccgaaaaacaggtgcagccgctgtgctgacagtgatcgggaccatcttatcaggaattgtgtttctatcgtcagctttattgatcgtcggtttaccgggcggtttcgccgcattgttcgcggctgttgttctgccggccgctgtgctgaatacaatctcaatgatcattatttatccgattgtgcaaaccattttaaggcgttcaagctttatggaagctgctaaataattgtcacacaaaacctcttccgcttccgggagaggttttttgaacagagcgtccgcagcatgtcagcatgttttaagcgaggagttttgtgaaaaagataagacatagtgtaaaggcggttccggttgaacaaacaagcgctttctgccggataaccctcttgggcggataagaagcagcctggctgagaagtttgatatagtaaacagcgcctgaagcgaaggcaagtgtgatgcaggataatacaatcaaaaagacagacaaccttctccctccttttcacttaaaaaatatgctaaaataaagcaagctatgtatagaagttcagactttcaacaaaaatgaaaaatgctgaatgaatcctattttgaagaaaaagacggggtgattgtaatggcgagcggacgttctctattaacaggactattcgtaggcggcatcatcggaggagcagcggttcttcttactgcaccttcctcaggaaagcagctgcgtgaaaaaatgaaaaccaattatgattcttttgaagaaacaatcaaacgcttaaagtcagacgggcttgcattaaaagaccagctgatcaaagcggcaaaagaaagcacggatgttattaaagacgtgggcggcgagctccaaacgtcaattaaaaaatggcaggaagagatcaagcctcaccagcaggatctgcaaaaagaaattgccgatatcgaagagaaaatcagacagctggagaaaaccttacaaaactaatatcctattcaaaagaaaaaaatgcgggccaaaagtggacccgtattttttttggccgaaaaaccctgccgccgcaatggtttgtgaatttattaaaaaattcttacattttcatctttattaatctttattttattggcataatagagaaaaagaaaaagagaagcaggtgacgtaatgaatcgagtggaaccgccctatgatgtgaaagaagctctagtcttcacccagaaaatggctcagcttagcaaggctctttggaaatcgatcgagaaggattggcagcaatggctcaaaccgtatgacctgaatattaatgagcatcatattttatggattgcgtatcaattgaatggagcttccatttctgaaatcgcgaagttcggggtcatgcacgtatcaaccgcattcaacttttcaaaaaagctggaagaacggggatatttaaggttctccaaacggctgaatgataaacggaacacatatgtccaattgactgaggaaggtaccgaggtattctggagcttgcttgaggaatttgatccgacacgcaacgctgtttttaaagggtcacagcctttgtatcatttattcggaaaatttcctgaagtggcagaaatgatgtgtatgatacgccatatctacggcgatgattttatggaaattttcgaaacgtcactcaccaatattgacaatgactttgaaagcgtaaacggaaaactgaagaaaaaagcaaaggacagtgcggcggatgaaccggctgaagagcttgaacctgtaaacagttaatcaaaatgcttcatgatgtcgataaagacttccatcagctcttgataaagtccctgctcatacagggcaaaaatcgtttcatgaacatctaatttttcattcagctgtccggcaaaaagcgcaaggagcttatcaaaggttacaaatccttgcgctttttgtgttgccagctcttccgacaattcgtcgcatatcctcataaccgcttccccttcttccttgctcagccctttatcaatgagaagcccatagaaggggtacctgtccatatctactgttttcactaataattgtatgtaatattctaatcgctcaatgcgatgatccatcgaatccatccacaccacttctttctatctttaatcttattttagctgataattcactgagaagaaagttctaaccccatatttcgcagtttgtttgcttgtttcaaaaaaatacctgccggatgatattttttcttaaaaaagcattgattttttctcttgggaggagtaaattattttgagattctattcaagatgtatggaaggatgactttgatgaattgctggaagaccataaatctcatgaaggattatggcgccgttcgcataatattaactgctgtatgttttatgattttggtttttatatctacctttttagcttttgagctgctgcggcctggcacaagcttaagcgatgaatatgtatctttattcggcggtttgctcgtcgttattttatttgcacataaagtcatccatgtcctgccaatcatctgcaaaaaaagaaaaatagaaaaaaagttttacatattgcgcatgcgcacatggaaacgcataccaaaaacaacaatgctgatttcactcgtcagcccgttcttgctgattacaccggtattgttttacgcagcactggcatttccgaatcacgctcattatttttgcatgatctcgggcattcacgccggctactgtctgcctgatttcctgctggctctcaagctgataaaagcaccgaaaaccgcttttattgatcaggaagctgacggcttggatattcttgttgaaaagtagtcaaaccctggtgctggtggcgatttttcaatttgcattctatcttttttaataaatatttggtaatgtaatatgggacagttcagagagagggggaatctcccatcattttattctattttatcgtggctgccgtgtttattttatatttcataaacaggctcaccaatacattatgccttgtcagagagattcctgaagagcggcaagataaggtattccgatttattaatgtatctatattaattttactgatctcttcgtttgtggagatctcctttacagtgtaaatacgaaagaaagcatagctgctgattaagcagctatgcttttttatgttgattagtacagccaagaagcgccgatgataatcaataaaataaataacacaaccaataaagcgaatccgcctgcaaatacttcacccatcttaaaaagcacctcctgtaataagctttatttaccaattacatgttatgcaattcatgtttgaaacgattaggcgctagtgaaaataaaggatcgcttatgttgcaagcgatcctcggtctgcttagtagatgtaagctgcacctacgatgataagcaaaatgaacagtactacgagcaacgcgaatccgttagagtatcctccgctcatgttacatacctccttttcttgatcaatatataagtatgtcatcagcaaaagtttgactagacgaatgccctttatttaaaatctttttacagaaagccacaatatgttatgatacgcataggtaatttaatttggaatgattaggagtgtttgaaaacaatgaagaaaatcgcaatagcagctatcactgctacaagcatcctcgctctcagtgcttgcagcagcggcgacaaagaagtcatcgcaaaaacagacgcaggcgatgtaacaaaaggcgagctttacacaaacatgaagaaaacagctggcgcaagcgtactgacacagctagtgcaagaaaaagtattggacaagaagtataaagtttcggataaagaaattgacaacaagctgaaagaatacaaaacgcagcttggcgatcaatatactgccctcgaaaagcaatatggcaaggattacctgaaagaacaagtaaaatatgaattgctgacacaaaaagcggctaaagataacatcaaagtaacagatgatgaaattaaagaatactgggaaggcttaaaaggccagattcgcgcaagccacatccttgtcgctgacaaaaagacagctgaggaaatagagaaaaagctgaaaaaaggcgagaaatttgatgcccttgcgaaggaatactctacagacacaggctcagctacaaacggtggcgaacttggctggatttcaaaagataacgaacaactggattccacattcagaaaagctgcattcaagttgaaaacaaacgaagtcagcgatcctgtgaaaacacaatttggctaccatatcatcaaaaagactgaagaacgcggcaaatacgatgatatgaaaaaagaactgaaatctgaagtgcttgaacaaaaactaaatgacagcaatgccgttcaggaagctgttcaaaaagtcatgaagaaggctgacatcgaagtaaaagataaagatctgaaagccacatttaatacatcttcaacaagcaacagcacttcttcatcttcaagcaattctaaataataaaaaaagctgtgcggctcaatgagccgcacagctttttttatgcgatggaatggttttgattttcttcttcatgctgctgagaactgcggcgttctcgctccttttccatcctctccatataaatctgtccttctttttcaataaaagcctggtctactttttcttcctctttggctgccgccacaagtttatatgcgctgaaaatgatgcctacaatacaaagatacacccaccatggaaaaaataacacgggcttctccccctttgcatagattctttattctttagcatatgcgggaatgagacgagttatgtgcgggaaagacgcatcaaaaaggactgagctgaatatgtcagcatcagtcctttttacgttatttatgaaatgtcggtttataaaaggaacggttttccagtgcaaatacacgttcagtatactcgcccggcttcacgcgttcaagcgctctgtccatcatattcatttttgcatccagattgtctatatagtgaagaatttccgcttctttcaccatcggcggttttgggctgccccattctgctttgccgtggtgactcaaaatcaaatgctgaagaattaacacctcttcagaatcgatttgaagctcctcagccgcttttgaaagctctgtcaccatgatggaaatatggccgagcaaattgccttcaaccgtatatgaagtggaaacagggccggacagctccttcacttttccaagatcatgcaggataacaccggcgtaaagcagatcacgatcaagagaaggatataaatctgctattgctttcgccaggttcagcatagagacaacatgatacgccaaacctgagacaaactcatggtggtttttcgtagccgccggataatccataaactcagcttcgtgttttttaaccaaaaaccttgtgattcgctggatattcggatttttcatttcaaatatatattgagtgatggtatccatcatttcattttttggaatcggcgcggtttctaaaaaatcatcaatattgacgttttcttgctcgcttaccggtctgatatttcttagcttcagctgggtgcgtccgcgataatgatgaacatcgccgacgaccttgacaatcgtctgcggcgcataggtcacttcatcactttgcttggcatcccacagcttcgcttcaatatcgcctgactggtcttgcagcatcagcgtcaaaaacggttttccattgcttgcaatccctttcgtcgaggatttaatcaatagatactggtccacctgttcgccaacctcatgtagcataatccctttagccattctattaaagctccctccgtatcttacataataccagtatatcacataccgattttcagctatagaacctcttttatgacaccaaatggatgatttggctgctatgaaatgcatcttttacgtgctcatggcatgtaaaatacaaaatctgcctaccgccttcagataaatcatacagaacatgtaatacacgtttcagcctttcctgatcaaaatgaacaaaactgtcgtcaagctggaacggaagctttgacccaccctggcgcgtaacggccaaagcaaatcggatcgctgtatacagctgttcacacgtcccttgtgacagctcttccgcatgatagacagttccatcgcgatgcataaccatgatcgaatcatccgtttcggaaaaataaatggtttggtagtttccgtcagtcagagggcggaagaattctcctgccgactctagaaggcgcggaagctcgatttttttatgccgctccaatttgtttctgatcacctgtttgaccatttgtatcgaggcccattttttagccgtttcttttacacgttctttttgcatttcggtttgaagcttgaggtctgagaccaatcccgaagcctctaattgttcctgtttgactgagagcagtgcgatttggctgcggagctgctcgatctcctcagtcagccgctcttttctttcattctcaacaaattgcttatctttcaattcagaaagcgtattggaatccgccagttcaagttcctccgggtacccgccttgaagctgtgcgtttacgtgatgaagcttgttctccgtatccttcaattgcctgctgatgtcggctatggcaaaaaacgcatctctgtcttttgcagcagccgcggcaaataactgttcaatctgtgcgtggaaatactgtatttcttgctcaagttcaagcatctgttcctttgtataatgaatatctgtttcaatttcctttttttgcttctcaatttctttttcacgttcaatgtttttccgcaatgtgtgaagggcgtccgaaatggagatatcctgactctgattcacgggaagaagcatactgacgcgttcttcgaatgttctccggtgctttttcagcctgcctgcttcaatggtcagctcatgctttttcttcacttcttttttaacatccttcattaagctgtatgcatcaagcaaaaatgatggatcttccttaaatccgagctcattcataaaacgctcaacctgtgtaaaggacggcgccatttcggcttcccactgttcaaactgctggatgaccctttcatacgccgcctccttttgctggagcgctgcacgctgtgtgagaaggtgctgcttattgcggtcatcctcccataacgcttctctaagcatttcagcttctgctggtgaaatatccgtcatgggctgtcttgtctctcggctgtttcgagaagacgattttcctgatacaagccaatacacaataagtgcagcgccgaaacttatggcgggaatccattgctgcagcagagaaaagagaacgatgaacaacataccagctgcaatgacagtctttttctgtttagcctgctgtctttcaaaaaacgttagctgttctctgagcttcgcttgctcttggtgctgcccctgtgtttcatcatatgctctaagagcagcttctttatcttttctttggctatcttcaagaatcgcggacgaagcggcacgaacggccttttccgtgtcttccagctcttgccgggcaagttcaaatgtctcgtcaagctgccgttttctgtctcttgcctgtacatattgctgcaccgcttgctgaagctgccattcataatcatatgaggtgttcatattcaggagctcattttcatccgttttattgagctgttccagccctgccgctgtctgcgcagacgtctggcgcagctgtgcctgaatggctgccagctgttctccccaggattggtacatatgaaacgctgccgaaagctcttgtatcagcgtttctttcgccaatagttctttatcggggataagcttttgcctctgtttgtccaactccgccatcttcacccgaagcgcctcaagctgtgctgatttcgggtgaagatgggattcgtatttttccagctgatgcaggccgtcagcaggaaattgtcctgcatgttccggatattctgcaatcacctgttcgagtgtcgctttttcatttagcagcggctttcgctcaatcgctccctcaatcattcggatatgtcccgccgtctctttcaattcggtttccgcggctgcaaggcgggctacaagcgttcgtttttcctcgagaagctgatgatagcccgcttcctctgcttcagcctgttttagcttcactgccagctgcttaagcgtttccagctcctgattcaattgagggtttcgcccatttggtttatagagcctttcgctttccttcgtcagccttgaatcaagctttgatacggcttcagcaccaaacaagctggaaaagagcaaaaattcccctatcttgtcccgattaaaggcgtgaatttcctgcagcccgaatacgtcgaacgaatatatggctttgtacaacgacctgtctgtgccctggaacagctgctttaaaacatctccctgctttacttcgcccttttctgtgtacacgcttagtttttcggcagtccctttcgtccgttcgatcttcagcaccccatactcaggatgttcagcttcaagaacaccgccgtagacaccgcctgttttcggttcatattttttcgttttcggaaaaccgaacagcatgctttcaatgaatgacatcatcgtcgtttttcctgcctcatttaatccgtagatgacttggacaggagaggcggaaaagtgaaaggtccgattggaaaattttccgtattggtagatatgtaaagatataattcgcaaagctgtcaccgcctcatgtatcaagcaccttaagctgtcttttcaataatatctgtgcctgctcttttatttcctttacctcctcttggctaaaccggtccgcgtgccttctatacactggatgccgctcaagcccttccagcacgtctgacagatcgctgcgatcaatgtcttcaaataaaccgccaaaaaaaggatcaaggtttgttaggtttgcttcgttttctgtctcatcgtccaatctaagaggccaaacgaaatgttcctcttccgcttcttgttcctgaagagcttcaagaaactcatccaaggtgccttttggcgcctccagcagccattccggcgccgtcccttgtaaaacaagccttacacaaacagggctcccctttttccgcagcttcgaaaacgtgtcctccaccatttggaagagggctgtcatattctttgcctccgtcacatcaaccgccgctttttcccacaggacatcatgcgctctctgaaattcataagatatatctccgtttgtcacatgaacgagataatagcctttatctcccgtctcctttatatggcgtgcttgcgtgtttcccgggtaaatgactgccggatgctcggcagatagaacctggcgtttatgtatatggccaagcgcccaataatccatcccgcttttcacgaggtcgtcatgtgtaaacgggcaatacggatcgtgtccttcagatcctgacagcgtgccgtggagcatgccgatatgaaacggtgcgtcagttgatctccgatagcgggcggcttggttttccgtcactgctctggcttgatagctgaagccgtaaatgcttgctatgcgcctgccttctttaaaaaacgatttttcttctggaacagcggacgaaaaaatatggacattctcaggccattcaatcggtgtccactccccgccaagatgatcgtgattcccaaagatgacgtataccgaaatcccgcactctctgagtctttcaaactgttttttcaaaaagagctgagcctttaagcttcgattggcttcatcaaacaggtctcccgccagcaaaatgaaatcaacgtgctctttcactgcggcgtctatcatatgtctcacgcttgcaaacgtgctttctttaatccgggcaaaaatcggctccggcagatgcgatatcccgtaaaacgggctgtcaagatgaagatctgccgcatgaataaaggttagatcagtcaacattctgctcctttccaggatgaagtacccttattttagcaccgaattcttgcgaatgcacgttctgtcaataaagaaacagcctgagaatccccaggctgttttccaatcagtttttcgctaaacgaagcgcttgtttgatcgctttgaacgcgcttgaattgccgtaaattaatacaccgcctttataaattctggcgccgataacggccagtatgacaatggtgagcagtgtgattccgattccgacagccgcctgccagaatggaatatcaagcatgccgacgcgcaggaacataatcattggcgtaaagaacggaataaacgaagttaccgtaataaatcctgcgtcaggcgcattcaaaccgaacatcgcgatcataaaaccggcgacaaccaaaagcgtcatcggcgtgatcgtttgctgcacgtcctctattctgctgacgacactgccgagaaacgcggcaagtgtcgcgtacaaaaagtatccgagcaaaaagaaaatgacagcatagatgacagtggttgcagatacgtcggtcaaattaaggaatccgccgacagatgaagccgtttcgctcttttggttcagcttaagcgacagagagccggctcctataataatagcaagctgtgtgatcccgacaagcccgataccaagcagctttgcaaacatttgctggatcggcggcatacttgagatcaggatttccataactcgcgaagatttttcggtagcgacctccatcgcaatcatgctggcatacataatcaccgagaaataaatgacgaacagcataatgtaaacaagccctaccgtctggccaagctcttcttcagacttcgccccttctttcagcgccttctgccccacagtaacgggcgcataaaggctgctgatcgtttcctgcgacacgccgagctccgctgttccgacagctgttttggtttgcgtcagcgcctgctgcagtgtttgatacgtgctttcatcagaaatcgttaacgctttatatgttcctgaaatggtccctttttcatctcgtttgatgatgagcatgccatcaagtgattcatctttgacttgctttgtgacctcatcctccgattgcttcgacagcttcacatcaagatcgccgtctgtatccaccgctttcatctgcttagaaaaaaccggatataattcgtttgtttcatcaacaacggcgattttttctttcgcatcgtcaccttgaaacaaagaaatgatcgactccaaattcgttacaactaaaacaagcagcaccgtgatgacagtcgaaataataaaggattttgccataatcttatttttgtatgtatgagaaagcatgatccaaaatttattcatagacggcccccaccttttctataaaaatatcatgcagtgacggctcttcaagctcaaactttctgataaacccttttccttggagcatcgcaaaaatctcttgagaaatgtcttcattggcaatctgcagcttgacgccgtctgccgtttccttccattgaagaatgccttcatgggactgcaaaaagcgcagatcgtcatcggagtgaatggtgacgttctttttgccaaaggagcgcttgatctccttcagcttgccttgcacgaccggtcttcctttctgcaatatgcaaaggttctcacaaagctcctccacatgttccatccggtggcttgaaaataaaatagaaacgccgctgtttttcagcgagatcacagcctcttttagcagctcaacattgacagggtccaggccgctgaaaggttcatcaagaataagcagctccggcttatgcaaaactgccgaaatgaattggattttttgctgattcccctttgaaagctcttccaccttcttattctcgtaatctgtaatattgaagcgttcaagccatgtcccgagctcttttacagcctctcgcttctccatcccttttaatctggcaagatagacgagctgatcccttaccttcattttcggataaaggccccgctcttccggcaaataaccgattttgttgctgatatgataattcacaggacggcccttccagctgattgagccctccgtaatgcttaataatcctaggatcatgcgaaacgttgttgtttttcccgctccgtttgcgcctaatagaccgaacatttgctgttccggaatatctaagtccaatccgtcaacggctttataatctccaaatgtcttcgttacgtgatcaattgtaagcactgaatctcctccttccctgacccattatatactaattttggataaagcataataaaggattttgatttcctttttagaatataaatgaagaaagactgataaaccttaaaatggaggagaaacctgatggctgattatttccttaccgtatttgatccttcggggaacacgctggtaaacgagcaattcgaggcagaacatgaagaagcggcaaaaacgcatggtgaagccctcttaaaagaaaaagagcttcatagtcatactcatcgtttagtcaatgcagccggaaaactgattttgtttcacagatgatcagctttccggctgatctgttacgcttgaaacttcggctcccgtttttctaaaaaggcacggattccttcttggtgatccttggtccttctcattctctcttgggcgctgcgctcaagggatagcacttttttcagttcttcaatctggaggctttgaaaaatagctttcgtttcgatcatcgccaaaagaggggaggccaacagggtttcgataatggatcttgcgccttcggcagggtctccggcaaatgtcccatcaagaagccccatatcggcagcttctgaggcagatagtttttttccgctccaaatcagttttttcgcttttgcttcaccgattcttttcttcagcaaataatgtcctccgccgtccggaacaagcccaatgccgataaaattcatcgcgaggacggcgtttttttcagcgagcacaatgtccgcacaaagcgccaaactcaggcccagtcccgcagcagcgccatgaatggctgcaattgtcactttcttcatctgatataaattcagggtgacagcctcaatcgtatccatcagccgtttaaattggtcagggtcatgctctgacgtcatcatcctgatatcaccgccggccgaaaagcctttcccgcttcctctcaggagaacgatgagcgcctcgcttgcagccgccatttcgactgcctccttcaattcagacagcatctgttcattcagggcgtgatgggcatcaggccgattcaggataatctctgcaacggccccattacatgcatattgaacaaactccattaaaagcacctccatgtatgcgcttacttttttctttctcctatacattccccgccatccccaaataaacctttttatttttcaaggtcaatagatactgaaaaatgcatattgtttgaatggaaacataaagttttatatagtgaaaaagaagggatatcttgatgagaagggaggaaaggaacatggataaattgctgatcagttttctgttaagtttatttatggtgtactttcccccttcggacgtggttctgccttcccagtttgaagcaagcactgacagctatgtgcctatgtcttcatatccgcaggaaacacaatcggcaaaaacgccatcgccgggcagcatgcacccggctgagctgatcaaagagtacagcccgctggcgcagtctgtcaggcagctctctgtcaaaccacttgacgaaccgctgataaacaggctggaaaaggctttggccgtccctgtcaaataccagtctaactacctccgaatataatttgctcaagttttatttgtaactcaccccatactgccaacactacattcggagggattttcattgaatattaaagaaaacgatctgccgggcatcggcaaaaagtttgaaatcgaaacaagaagccacgaaaaaatgacgattatcattcatgatgacggaagaagggaaatttaccggtttaatgaccgggacccggatgagcttctttcaaatatttcattggatgattctgaagcaaggcaaattgcagctattcttggaggcatggtctataaaccgcaagctctggagtccatcgaaatggccttcagcgatcttattattgaatggtttaaggtcgaaaaaggcgccaaatcgatcgggcgcacactcggagagcttgatgttcgccagaattacgatgtcactgtgattgccattatcaaacacaaccaggaaaagctcctaaatcccggagccgattcgattattgaagaaaatgacacccttgtcctctcaggtgagagaaagcatctgaagaaactgattcacgattttctttctggagagggcgtgtgagccccgatggaccatcttgtatttgaagtcggaactgcacttgtgcttgtggcaatcgccagtgtgatcgccaataaaattaaattttcgattattccgtttctgattgtgctgggaatgcttgttggaccgcacgcgccgaaaatggggattattgatctaacatttattcaaagcagtgaaatcatcgagtttttcgggcgaatgggcgtactgttcctcctcttctatctcggactcgaattctctgtcgggaagttaatcaaatcaggaaaatcaatcgcggtcggcgggacgatttatattttgattaacttcagcctcggactgctttacgggtttatcaccggattttcctttctggaagtcctcatcctcgcaggcgtcatcacaatctcgtcaagtgcgattgtcgcaaaagtgctcgttgatttaaaaagaaccgccaacccggaaaccgaattgattctcggcatcatcatgtttgaagatattttccttgccgtatatctgtccgttgtttccggccttatactaggtgatgcgacatccgtagggagtgcactcttgtccattttgatcgccttcggttatatgctgctgttttttatcgcagcaagaaaactcccaccgctgttgaacaaactgttggacattcgctcaaacgaagtgtttattatcgtcattttcgcagcactcttttttatcgccgggttttcagagacgattcatgtagcagaagcaatcggcgcgctgctgctcggtttggtcttttcagaaacagagcattccgataggattgaacacctcgttgttccgtttcgcgacttcttcggtgcgatgttctttttcagcttcggcctcagtatcgatccgttttcgcttggtgaagcggtttggcttgcgttgggtgcagtgattttgaccattctgggaaattttatcgccggaatggtggcaggacgacgcgcagggctttctcataaggcttcatcgaatatcgggctgacgatcgtatcgcggggagaattttcgattatcgttgcgaatctcgggatagccggcggactgtcggccacattaaagccgtttgccgcattatatgtcctcattctggcgattttgggaccgcttgtcacaaaggaatcaaaacgaatttaccgcttgctgaacaaggtatttaaatggaagcctgaggttcagcccgcaaaaaaacagggataaaaaaagcagcactgtaatcagtgctgctttgtcgttttttcaaaaatctgctctaaatatttgattttttcgtccgtgtagtgctcgaagcgctcattgtacgatttcggatctttcggattcgcaaaatgcgtgattttccctgtatcccgatcaataaatttactagcagcgccgcagccgattccgataatcgtctggacctcttccataatcataatgttgtagatgctttcttgtcccggcaaagagtatccgacgttttcaaggtttccaagaatgtttttctggcggtataaataataaggcacgtacccatgctctttcgtccaggctaccgcgtcttccatcatttgagaaacctcttccctgccggcaactttgtacttatgcttgtttctcgtcatttctgacgcccgtttaaatgaaagagtatgaacggtaagggattccggcatcagtttttctgtttctgaaagactgtgcctgaactccttcacgccttccccaggcaaaccaataatcaagtccatgttgatattattcatgccgtgctggcgtgacagatgatatttctcaatggtctcttcaaccgtatggtgccgcccgatcgcctttagcgtttcgttttcgtaggattgcggattgatgctgatccgatcaatgtcatatttgtttaaaacggcgagtttttcttctgtaatcgtgtcaggacgaccggcctccaccgtaatctcacgaatgtttttcacatccgggaaggagcggaccatttcttcatacagcagatccatctcctccgctgtaatgcttgtcggcgtcccgccgccaaagtaaatggttgtaaccttaacatcatgctccttcagccattcaccgattttctgcatttcgtaatgcagtccccataggaatgagccgactctgcctgcctgtccctggatggcatacgcagggaatgtgcaatacgcgcattttgtcgggcagaacggaatgccgatataaatgctgacttcatcctttactcggtacaaatccggcactgccgccagctgacgatcaacaatttcctgcattagcatgattttttcatcatgaattaaatagtcttttttcaactcagcatgcgcttgctccttggacattccgctttgcagttttttatgaagcagctttgtgggccggattcctgtgaggattccccacttctgcgtaatgcccgtatgcgcctgaagaagattgagatacacataagaaattgtgtttttcacttgcttaaaagcttctttttcattcatgccgggagaaaagaattttgtatgctgttcctttatgccagttcccttcacttctcccgaaaccgtcacatgctcatccgtttgtgacaacgctaaagaaatgacataatctgcgggctcctctccgccatacgcaagctcgcactcttcataaaacaaatttgcaatattttgcagaggccgatgcaggcggtcatcatgtatgccttctattttaatttgcaacttcatcacctaatttatcagattcaaaactttctttagtgtacagaaataaactgctaaaatcaatccggcaaaaaagccgccgcacctgtcagggtgcgagcggcttttttacacacgtttcatgtggaacttatcaagaaatccttttcgctgctgcattcggaaatattccttcatcatataagcgacaccttgctcgtcattggaccttgtaacccaatctgcctttctcttaatttccggaacggcattccccatcgctaccccaagaccggcaagttcgatcatcggcagatcgtcatactgatgcccaatggccacgacatcatccatactcaggcccagctctgaagcgacgagggccaaacccgcttccttcgagacacctttcgggacgatattcagcttctcatcgtttacgcgaatcacgtccaccgcagggaaggcttttgtaatcgtttctgtaatgtcatgctgaatgtcgtgctccgtgtacacctcgatgacgggtgcactcaccggctcatccatgaggagatcgcttaatgattcaacgaactggactggataaaagatcgggtcagacggatgaatgagtgctttccccaataaattcgaattcacctttttcttgtttccgatggaatacttttcgtgaagaagccgaatattacattgatagctctccagcacttgaacaatgttaaaggtatgatcatcagaaattcttttttcaaaaaacggggcgtcaattttctcagcgatatatgccccgctatgggtgatcagcttggcatcaagctttagcgatttcgctattttctgtgctgagcgaaaatgacggttggtcacaagtgtgacgtaaatcccttttttctttacatattcaatcgcgtctttcgttgcctgatgaatcttcccgttcgaccgaagcagcgctccatctatatttaaggcaagcaattgttttgacacagagatgtccccctccttgatgactgtacttgtgtataggatatgaccctgtctctgtgtttagaacaaccttttcttaaagcaaaaaaagcctggctcagcagactttatttatggcttgttgataggatacgatcgaagcagccattctccctaatatcgttatttcgatttacgaaaaatcatgtatcaggaaccccttgtttgaccaatgatgcgctccgaacacttactctctgttgcttatcccctctatataacggcatgatatgcgaccgtatccatttgaaataggtaagtgtaggcgctttcaatgttattatctcagttttcttttccgatgacaagggtttttttaactaaaaaaagtaaccaacttttgtatatccgtggtaggatcagttgttaatttttaggactatacacttgatccagaacgtacattcccatacaatataaataataaacgaaaaagcggtgtttatatggctgatttaaaagaaatatataatgaagaactgatatctcagttgatccatcatgtaaggtcatcctatcctgattttaacaaaaacagattcttgggtacattacggctggaggactggcctgaactcactttaaaagagcggatgcgccgcgtgacagtttctttatacgaaactttgccaaaacaatacgttgaagcgctcacaattttacgggatacagcccctcattttaaaggactcagcggaattttatttccagattatgtggaacagtacgggttagcgcattgggaagaatcaataaaggcattggaatactttacgcaatattcgacctcagaatttgctgtaaggccttttttgctgttagatcaagaaaagatgattgcacaattgcttgcatggtctgagcataaaaatgaacacgtgagaagacttgcgagcgaaggcagcaggccccgcctgccatggggaaaatcgataccggctttgaaatcggacccttcccccgtattgccgatccttgagaagctgatgcaggacgagtccttatatgtaaggaaaagcgtggccaacaaccttaatgatatatcaaaaacgcatcctcatttactgagaaaagtcgcagatcaatggtacggaacacatccccatacagactggattatcaaacacgcctatcggaccttattaaaaaagggtgataaacaggccttagcgctttttggttatgaaaatgctgattcgatacaactacatgatttaacatgccagcccaaacgtatagttattggcgaaagccttgaattttctttctatattcattcagacagggatcaaaaagtaagaattgagtacgcaattgattttgtaaaagcaagaggccagcgtcatcagaaagtatttaaaataacagaaacaaatatacgaaaaaacgaaacgaagtcatacacaagaatccaatcctttaaggatttaaccaccagaaagcattacaaaggaattcatacattatcagtcatcatcaatggagaggtaaaagattcattggatttccaagtttgctgaatgaataaaaaatcccttcttatccaagaagggattttgctgattagccttcaacactgccgtaaagctcttctaaaggcttcataatgattttgttcaattcaccaatcagcatgctcatgcgctgctccgattccatcagctgagaaattttttcgtgctgctgtacaagcgcaactgttttttgagcctgcgtcacttcttcttgtgtaatctcttctcctgccatttgtttttgctggagtctaagctgtacatcacggaagttttcgaacatgcgcttcgctgattcatctgcgttaacttcgtcgtaaaggttttttaaacgggtgaactcttcgctcccgcgtaatgcattttccagatcatacgctacatcataaaaattaacagccattgtaaatagctcctttcatcattgccgtttgacataccactccactataacagactatggagatcctttcattaatcaaaacccatttcttcttaaaaaaggatgacaaacagtgcttgaatcgcgcctataattccgccgagaaggccccccaaataggtaatcattttaaattctttttttgaaatggacagcaccatttcttcaagacgctccaccgggaactgatccacctgctccttgacgatttcctcaagacgcaaccgttttaagacactttcaaggttggacgaaatcccttcaagcaatttgtctaacagtgccggcagcatttgctgggtcagctcagattcatagcggacggtaagcgtgccaatcgtattgttgaagaaaggggcagtcgaaaatacttgcagcattcttcgtttcaaactgaaaatgagcgcctttgcattccatttttcgtctgcttcattaaacgtatactccctcagcttgccccattcgttttttaagagatcagaaagcaatttatttgtttcctcattccgcaagaatttcagcagctccggcagcacgcgatccgcaaggcttgaattgccaagaaacatttgcaccatgcttccaagcatgccgcgctcttttaaaaagtcatcaatcatattgccaagacggatttttccttcatcactttcaaaataacggacactccgtgacaatatatatcctgaaatcatcggaattttttcctcaagcttttcctgcacctctataggcaccagctcttttaacgattggtccccgtattggcggaaaagctcattcagcttatcatcggtccagctgctgatccatgcatcagcagctttttcggggcgcttcatcccggctttttcaagcgcttcttttactgtcacttcagaaagtgacagcttttgaatcagctgttcccccactcgaagagcctgcgttttggctgcatcagagacgagccgctttttaatgccttcaggggttaagagatgattgactaccatcagtcccatttgttttgcaagttcatctcgccgtcttggaatcagcccgggcgtaaaaggaactcgcttcccaaacaaatagtacgctttatacggcctaaacagcatttgaattgctaaatgattggtcaccgctccaatggcagcgccgatcacgatcataaaaataaaggttcctgcaatacccattcctattcatcttcctccatctgtgcttcagcttttttcatatagattatgtacctatacgtattatagaggctcatgcaatcacttagcaaacgaggagacaaattcctgttcttagaaaatcagcttgttcttttggaatagggcaaggtgaagaatcgtattctgtaaagtagaataccgtcagctgcgttcgtcttacatgtatttagtgtaaagctgcggacacccgccggcagcttttgaataaaagggggagtctcaccatgataacactcggttttatgtccttatcccgccagcatgaagcggattattccgcagaactggccaaaagagcacccgaattcggcatacgtttcatccggtttacaccatttgatattttacctgacactttgcgtgtcaaagcatcggtctatcattcggccagcagcacatggaacgaaactgaaatggcgattccagattatatttatgatcgctgtttttacggcaaggattcacattcccaaaaagcaaaaccaatcgttgagtggctcaaaaaatatccgaaaacggaatttatcgggcggggtcttcccgataagtggaccgtccttcacgatttgcagcagcactctgtaatcaatccctatattccggaaacgataaaggtgagccgctacgaacaaattcactcctttttatccaaagaaaaagcctgcatccttaaaccggcattcggcgcgggaggcagaggcgtgattctattgaagctgggcaagaaaaacatcacagctacttatcacatcggaaaggataagcagacaaaaacgttttccaaccagacttcttttaaaacatggtgcaaaaaagtgcttcagcatcaatatttgcttcagccttacttaaacattcaagataaggaacaatacccttgtgatattcgtctgtttatggaaaaaaacgaagcaggtgaatggaatacagtcggaaaggcagtaagacgcggatacaaacacgggctgctggccaatttgtcaggcggatctgatgcgctgacatttgactcctggtttgaagatataccgaaaaaacagcaagtggttttactagatgatgtgttttcgattacccaatcggttccgtattatcttgacgagcgctatggaccgttgtttgaactcggtcttgatatatgtcttgctaaggacgggagaatttggattttagatatcaattcaaaaccgggcaggaagtcaatcctgcgtgtctctcccgagcaaaaagaacagctgtacacttgtcccctaaagcgctgccaatatctgttttctgagcaaagccagaaaggagttcttccgcgtgaatcctaaacggtttttgatcggcatagacaaaaccagtgaaaacaccctgtttctgccctcttcgctgaagcgagacggacttttgcatgccgcattcggaacgaaggttgtcagatgccacgttgcttacagacggcatctggaacaaaccgtgctactctctgaaaatctgtttcatgagcttttgctcccccaccgaagcagggctgatatactgattcatgatcatacagtgcatatcgggccgttagtcggcatctttacggcagggtttactgtatctcttgaacgtccatttaaggatcgttccctctttttttctaaacttgtcacgttacacgagcaagccggaggctactgcttcgtttttggcgcgcaccaaatcaattgggaggaaggcacgattgaaggcctcctttacagggaaaacggctgggagaaaaaaattgttccattgccgaacgtcgtttatgaccgtttgccgaaccgaaaaattgaagattcacttctcttgcaacatacaaaaaagaggctgatcgatgaatatcagatcccatggtttaataaaacgtttttcaataaatggaacgttcatcaattgctcgaaaaagatccgagaacggcaccctttttgcctagatccgagctgacaccgtctgtggagctgatagatgagctctgtggcgcatacaaaaaagtctatatcaaaccggcaaatggagcactcggcaccggcatttatcagctgaaaagaacagatggcggcctgacggtaaagcatacgaatgacgccaaaacatttacttcgattgattattccgatgccgcctcattccttgcagaatttcaaaaacagcacaacacgtccgactttctcattcagcaaggtgttgatctcatcgaatttcaaggcaaaccagcggatttccgtgtccataccaataaaaacagaaaaggaaaatggacagtgacagcaatcgccgtaaaaatttccggaaagaacagcattacaacacatctttctaacggcggcactgtaaagacacttgcggaagtatacgatgatcccactgaaagagttgaggtcataaaaaagctttctgcagcggcactgacggcaagccatgtccttcatgatcatatcgaggggtttatcggggagattggtttcgattttggcattgatcagaacggtaaagtatggatgtttgaagcgaattcgcgcccaggccgaagcattttttctcatccaaatttgcatcatgttgattctcttacaaaacgaagaagctttgaatacgcgtcatatttatctgagaaggcaatcacatctcctgaagcattgtggccttcgtaacctgtccgcttttttaataaagcgggcttatctttatccaaagctgggacaatctgcatattaaggcctcttcaatgatgttctgaaacaatgatacaatgaacataagccgtttttattcaggtcaattgataccaaatgtaaggagcgtggccgtaatgatttctcatttcagctggaaacctttgttcccaaaagaaaagctgcccggatggaaaatttcattttattataaagggacccattatgaaggcatctatcataagagcggtgagattgaatggggagacttgtttcccgcccgcgctgacgagcctgctcttacaaacgagatacatgaactgatgctttttcatatttatgactagcttagcctaaacggctaagctttttttgctttctcaagatttaccacacaattctccgcatgagtttccggccattttaacataatacgtagtaacaagccggcaaagcattgggttacgccgaggcggcagtgacacccgagaagggttcacagattggtgcaactccagttaacccaaccatactaaataaaaaggagattttacacatggctaaccaaaactcttcaaatgacttgctagttcctggcgcagctcaggctatcgatcaaatgaaacttgaaatcgcttctgaattcggcgttaaccttggagcggacacaacttctcgcgctaacggttctgtcggaggagaaatcacaaaacgtttagtatctttcgctcagcagcaaatgggcggcagagttcaataacaattcaatatatggctatagagggcgcggtttccgcgctctctttattttgtcacccttttttcctactccacatatcctagaaaaaaagggagggaatcggggtgtcattcatcaccattgtgaattgggagctggttcagttcgtaagtgtatccatgattcatgaatatgtttcccatcgttctgtttatttgtacaggtattctttcccgcgctgttcaaactgagaacatccttttataatgaaaggcgaggaggttttttgatgaaaatcgctttattaggagccagcggccgcgtcggacaagcctttttaacacaagctgcagcagatgaaagatttgatattttcgctctgatcagatctcaacatgctgattttcccctttcaaaagacagaaccatcatggggaacgcccgccgcttagaagatgtgaaaaaaataatggagaatgctgaaatcgtgatcagctgtctaggcacagatggtgatgataccttgtcaactgctatggcacacattctctccgctatggaggaacagcatatcaaacggcttattacgatcggcaccgcagggatcctagattcccgatatgaaccggggaaataccggtttgaaacaaatgaatcgaaacgaaagcagacccgcgcagccaaggagcatgcaaaagtatacgaaatgcttaaagaatcatcattagactggacaatcatctgccccacttacctcccggacggaacagcaaccggcgtttatcgtacggagcgtaacgttttgcctgagggcggcacaagcatttcggtcggcgatactgcggactttttatatcgtgagctcgttacaggtgagtatgtcggataccgtgtcggactggcttattgactacataaaccaaaaacccaaaacccgattgttttgggttttttgagcgttatgcaatggaatgtttctgtcccttttgcagttcatacatttgataatattggccttctaatgccatcaattcctcgtggttccctctctcaacaatttcccctttatcaagaaccaaaatctgatcagcatttctgattgttgaaagccggtgagcgatgacgaaggtggtgcgtccttgtttgacgacatcaagcgccttctggatcacggcctctgtctctgtatcaatatgcgccgttgcctcatctaaaatcaagatcgcgggatcaaacgccaaagctctagcgaaagaaattaactgccgctctccagaggatagcgtgctgcctttttcaatcacgggctcattaatgcccttcggaagcttcttaagaagaggctcagcaccgacttgccgcagtgcattttttatttcttcttcagtcattctttcgtcatccagacttacgttagatccgattgtgcccgagaataagtacgggtcctgaagcacaatgcccatatgggatctgagttcctgtcttgacatgttgtaaatgctttttccatcaattaagacatcacctttttgcgcatcataaaaacgaaacagaagattcaaaatcgagctttttcctgatccggtatggccgacgagcgctacggtttcgcctttttgcgcagtaaaggaaatatgctttaatacctcttcaccttcttgatacgcaaatgacacatcacgaaattcaacccgtcccagcgcgcgctccttcgccggttcacccgcttcttccgtattcttttcttcaagcagttcaaaaacacgcccggcggagacccttgcaagctccagctttgaaaactgattgacgatgcctgtgatcggctgaaataaccggttcaaataatcgacaaacgcgtacagtacaccgatagaaacaatcccggccgcattcaggctcgcaccgccaaaatgccagatcagacagacgaacgcaagattgcggatgacattgaccaaattatgggacattaaggagtttaaattcagcatcctgttttggaaataaaaatgtgattcatttaattcctcaaattctctcattgtttccttttgatggcggaaagcctgaataatggtcatgccttgaattgactcattcatttttgcgttaatgtcactgttgatcgagcggattttttggttgtaatatgacgcatatctccggtatatgactgaccacagccagataatcggcacaattgccagacatacaaacgcaagcttcacatcaagcagaaacaaagccgtgaatatcccgaacatatagattccgcttgtcacaaatgtggaaagcactgtgacatataaatccctgatagcctccgtatcattggtaatccgcgcaacgacttttccggccggaaggttgtcaaaatagcgaatcggcattctctgtatgtgcgaaaacacgtcctgcctcatcttttgaataatccgattggcgctcatctgcagcagataatgctgtccgtattgaaagaatactgaaaacacaagcaagcccccatacaggcagatcagtaacaccattccctttatttccggctgatagaactggaaaagttcctgcttagtcagcttttcggcagcatatgtccggctcttgtctccgtttgtgatcgtcagcttcccgtcagaaactgttctattcccgtcgaagctgacagcctgatcaacaaaatagaacgccattcccacttgataaatatgtgcttcttttgcttttgaaacaggctcctgcaatcggtcctctctgacatatgagacgccgtgaaactgaacggcatttttatctttttccgcagcttcataccatgttttctcaatgccgaggatatggtcgtctatcattttcttgccgataaacggcccggtcagttctgcaccgacggcgacagctagcaataggacggccgtgatcagcaattttcgataaaggagtgcgtatctccataacgtttttcctattttcatgcccctgctcccccttcttcggccgtgaacagctgctgtctttcatattgttcccggtaccacccattattggccagcagttcttgatgcgtgcctctctcaacaatgacgccgccgtccatcacaaggatcaggtcagcgtgctcaaccgcggataatcggtgcgtcaaaataaatgtcgtttttcctttgcggttttctctgatgttcttgataattgcagcctctgttttggcatctacagcggaaagtgaatcatccagaatcaagatttccggattcgccatgagtgctctcgcaatcgaaattctttgtttctgcccgcctgacagtgccacgcctttttcaccgaccattgtctccagaccggacggaagcatgtgcaaatctttttcaaaatgtgcttcggcaatggcttgctgaacctctttatcagttgcatcctgttttccgtataaaatattttcttttacagtccgtgaaaacagtaaatgatcctgcggcacatatccgatccatccgcggagctggtcaagagggatttgctgaatcggtacgcctgaaaatgtaatgctcccttcacctggagggtactggcgcaaaagctgcttaataattgtcgtttttccgctcccggttttaccggcaatcccgacagtctgcccttttcgcaccgtaaatgaaatatcctgaagattgtcacttgttgagcttggatatgtaaagctgacatgactgaaaacgatatctccaggctctttaagatcagcgggctgttttggatctgtcacatccgtttcataagaaagagtttcatttacccgatctaatgacgcattgccgcgctgcatcacgttaatgagttcaccgattgcaaacatcggccaaatcatcatgccgagataaacgttaaaggacactaactctccaagcgtcagctcgttccggaatacaagaaacgctccgtagccgagcccaatcagatagcttgcgccgacaagcagtttcaccgtcggctcaaacagtgaatcaataaaagccactttcatatttttctgataaacatcagcggtcatttcattaaaccgccgaacatcgtttgtttcctgaacatacgcgcgaatcacccgcacgcctgaaacagattccagcactctgtcattcagcgccccgaacgcgttttgggccccagtaaaccgctcatgaattttacttccatatagactgattgcaatcgccatgactggaagcgggataatggcggcaaaggtcagcttccagctgatcaaaaaccccattgtcaaaaagatcgtcatcataaacatcgtagaatcaactaacgtcaagatgccaaaccctgtggttaaactgacggcctgaagatcatttgtccctcgtgccattaaatcgcctgtccggtttttttcataaaacggcggcgacatagtcagcaaatgccccatcagcttcgtacgaagaattttctccatcagattcgctccgccaaacagctgatgcatccaaaaataagacatgatatacacggccgccgtcagcacaaaaaagataccgatataaaacagcagcccttccgcagtaaatgcccctgctttcatatcatctatggcgttccccaagagcttaggcggaaacatttcaatgacattgactgctaataaaaggacaatcgcaatcgtatagcgcagccagtacgccttaaaaaaccagccaagctttttcaaaactgaaaacatctatccccatctcctcatcagccgccttctattttttccttgcagcttttttcatccaatttggcacgaacagccctcgcctctgtattggtcttcacatcccatacacctgtctttccttagattttgtatataaaaaaggcatgaagcgtcagctccatgccttttttaaccgatatgttacgcacagcgcttttcagcgcgcggtccgacctaaaaaaccgttcacgaaaacagaacaaaaggtttgccgcgccaatatgaaactgtttgataaacacgcaaattccttggcatagcaaaccctccttccattttgatttcatcttcttatcatcatataaacaaaaccttttattgtcaatcattacttgaataggaaagggttaattgtgctcaaattcgggtagtagtgttgtaagacgctttgaaagggtgagaaggatgttccatgctgaccgtatcattgttgcgtttgacggaagtgaaaatagtaagaaagcgcttcagacagccattgatcttgctaaaaccttaaatgccgctattaccgtcgcccattcacatgatatgaaagacaatcagaccgtcatcgacccacccagacccgcagctgaggcaagctatatcagcggaggcatgacaagtgttcctgatccgctgatatcggatgtaacatcacctgagccaatgatctatgaagaccgtacggaagaagtcatcgccgaagcaagaatgatgctgaatgaacagcaggcagatggagatatcgatatattagaaggcgatccggctgaatcaattatcgagcatgcaaaccgcatttctgccgatatgatcgtaaccggaagcagagaccaaaacaggctgaaaaagctaatattcggaagtgtaagtgaaaagctttcagcgaaatcggatatacccgtcctgattgtaaagtgagcacgccctgtgctcacttcttttatattcataattgtgaaaaaacatagattttcgtttttttctgttataatgctttcgtgcccaaaagcacaaaagcattaaagataaatatggggtgttattttggattctcaaaaaaagctgacgtttccgttagccgtcggtttatttatattcatgttatgcattattatttcttgcttattcttgcttcatgtagaacctcatatcccgctgtttttaagtgttgtcatgctttcagcagcagctttatggtttggattttcctggaagagtattgaaaaagggattgtagacgggatcaaaaacggcgtacagccgattattgttctagcgctgatcggcatcttaatcggcgcctggatgtacagcggcgcaataccgactgtgacagtttatgccctatcctttattgaaccaagccaccttctgttgactgctttgttttcatgtatgatcatcagcacacttgttggctcaagcctgacaactgtaagcacaatcggggtagcgctgattggcgtagcgagcgcggccggcgttccgcttgaatggacagcaggcgcagtcatatgcggcgcttgttttggggataaaatgtcgccgatgtcggacacaaccaactttgcagccggaataggcgaaataccgatctttgaacacattcgccatatgatgggcacaaccattccagctttgctcatcactgtcgttctgttttactttctcggttcatcagtgtcagcggacgctgcttcaaccgataatattcagcaggtcataaccggaataaaagatgttgcaaacgtgacaccgtgggcccttctttctccgctcttagtcgttttgctggcaatgaaacgggtatcagtaatccccgttctgactgccggaattatttcctcgggaattttgactgctatttttgtacccgacagcagcctgcaggcgtttatgacagctttgcaaaatggcacaactttcgaaactgacaatgaggcagccgctaaaattatcaacagaggcggattgcaatccatgatgggctctgtctctctcattatgattgcttttgcacttggcggattgatggagaaaatcggattgatttctgcactattggaaggcatcatgaaaggcatccgctcaaaaggccgtctagttgcagcaactgtctgctcaagcatcggcgtcaacttggcaaccggtgaacagtatttatcgatattaataccgggacaatcatttaaatccttatatgacaaacaaaacatccagcgaaaatttctgacaaggtcattagaggacggcggaacattaattaacccattgattccttggggcgtcagcggcgcatttatggcgagcgcacttggtgttccagtcatagactacatcccgtttacgttcttcctctatatatcgccgatgatctccattttgattggatttgttaaaaaataaaaagagctccgctgtaaaaagcgggctcttttcttcgttcatttatgaatgctagcagcctgttgaatgctttcttgaaaagcagcctgaagctgtttggtcaccggtccgggtttcccgcttccgaccgattgtccatcgagcgtcacaaccggaataatttctgccgtcgttgacgaaataaagatctcttccgcctgtttcaactcttcttcactgacaggagtctcatccagtttgatcccattcttctcaatcagtcctaaaatattcatccgtgtaattccattgagaatgagccggttagccggatgtgttcgcaccgtgccgttgataaccgcataaacgttagaggatgtaccctccgtaacaacgccgtccctaagtaaaatggcttcaaatgctcccgcttcataggccctttgcttcgtcatgacattatacagtaaattcagacttttgatatcacatcttaaccagcgaagatcctcatctgtaatggctgccactccgtatgcctgctcttgatccggttttttcaccgtaaacgtataagcagtagtctgcggctcgaggccggcttcatactggtgttttcgcggggccacacctcttgttgtctgaatgtataccgctccctcactgaccgcattttcctgtacaagcttttgcaggtcccactcgagatcttctatactgaatggcagtgaaattccgatttcagcagcacttctgaaaaaacgctctgcatgctcacgtaagccgaacaatactcctttgtacaccctgatcacttcatagatgccgtcaccaaactgataaccgcgatcttccaaatcgattgatgcttcactgcgcccaatcagccggccattgactaaaaccttcataaaagccctcccttttcgagatgtccctgatgtcattcaagctgtcattgtcactaattctaccatattggacaagctgaaaaacagaaagatcaagagatctatagcggaaaggagtttattttttccttaaaatctgacatttcgacaaattttctatgtgctttccagttttattcctgtatacttgactggtaatacataggttgtaaacataaggcatcttcataagctgcctgctgtacagcattatgtagagattttatgccaatggagagattgttatgcgacaaacgagaggagaggcttctccttctgcagtttcgcttgcttttaaatttgcaagtttagcagttttatgtgtgctgcttttgcttatggtgattttgggttattccaacagttcaacgaaagcaaaggaagtcactgtcacaacaaacggccagcttcgagatgagaaggaaagccttaagctgaaaaacgactcccccgatctcctgataaaacatctgcagacaaagcagaacatgggagataaaacggtttacttaaccttcgacgacggcccttcagccgttacaacccgcttgctcgacgtactgaaaagcgctgatgtaaaagcgacgttttttatgctgtcaccgcggatgaacgaattcaagcaggctgtgaaaagagcagaaaaggaaggccacgcactcggtttacatggcgttacccacaataacagattgttctatcaaacaccgacatctccgctaaaagaaatgcaggaggcgcgtgacacgctgcaggacattacaggatataaaaccgatcttgtcagaacgccatacggaagcaagccgtcactaaccgcctcacaaattcgcaatctggagaaagatgggtttgtgtactgggattggacgatcgacagcatggactggaaataccggaattcacagtatgtgaccgccgtattacagcagcttgagaatatggaacacagctcttcaagccgcccaaatgtaattctcatgcatgatcttcctgctactgtaaatgcgctgccggtactaatcaataaattaaaagaaaaaggctattccttcggagtgttagaggacacaatggttcctgttcatgaataaaaaagtgaggcgcataaagcggctcactttttcatgcccaaacttcgggcaaactcgccgattttttgatggatgaccatgtcaaacaagctgtcgcaatacgttggttcaaggtttatgatgactttcttcatgccgggaatcaggcttgcatcctcaggcacaaatctagccggagccacttcgagagacgtgccgataaccaataaaagatctgcttgatccagcttttcataaagggtgtcaaagtgcatgacggcatcgccaaagagaacaacatcggtttttaataccgttccgcaaatgtccccattgtttccggccgccgtgcactccggcacctcccgctccagcaaatggggaagatcatatcgggcgccgcatgccggacaagctgctgtctggatagaaccatgcagttcgtacacatgcctgctccccgcttttttatgaagaccgtcaatgttttgcgtgaaaatatcgacctgcttcccttgcttctccagctcagctaaaagcaaatggccttcattcggttcaaagctgccgctcattttcatctggaacaattctttgaatttgggccaaaacagacgcggataacttaaaaaataatcaaggctcatcgcttccattcttgaggcatcctccgtccaaatgccccctgctgaacgaaagtcggggatccctgattctgtgctcattcccgctccggtcagcacaacaattctctgtgcttcatgtagaatacttttgaatgtttccaactcaacaccgcctttttctcttattttaccatgaaaaagactccgcctctgtcagacgaagtctctcttttaagcccgttccttttcctctttatttagattcacctggaatgggtcgctttcgtgcttttgcttgacaacaaccatttggccgggatatgcaaactgaacgccttctgcacctaaaatctcaataattttatagttgatatcctctctaatattaaggttttcagcccaaaccgtcgtttttgtatagaagttaaaaaataaattgtagtagctgtcggcaaacgtatcaaagttgaccatgattatttcattatcaacgccctcatgctctaagagcattgttctgagagaatgaatggagcgttcaaggttctcaatcggcgtagcgtaggacacatggatggaaaacgtaatctggcgtttggtcattcttgtccagttcgtgatcgcttccatcgacagcgtagagttcggcaccgttacaagcgccccctgtgctgttctgaatctcgtgctcctaaaggtaatatcctcgactgatcctgttactgtcgacgtctccacccagtcaccaattgtaaacggcttttcagtaataatgataataccgccgaagaagttgctgatggtatccttcgcggcaagcgcaaaagccagtccgccaagaccaaggcccgctacaaatccgtttacatcataattgaattcctgagcgatcacactgacactgagcgcaatgatcacaaaacggagcaatttggataaaaacggggccagaatgtcatccatgtcaagctcgaagcgctggttcaccttatggaagataaacgacgatgttgcggtcaaattacaaagaccccaacacaagagcgccacaatcagtgagcggtatattttgctgatgaccggcatttgctcatctaaaaacggtgaataccggatcgctaaaaacagcccaagggcaacaaaaaaccatctggccggcttatcaaacgccagaaccacctgtttaaaaatttctgttttcggccggtttgtcaaattaaaaagcaggttaaaaaaatatcttgtgaataattttctaagtataagaaacaccagcaaaatcgccaagctgatgccgatttgtatgatgttatcaagcgtaaaatactgctgcagataatccggcatgactgtctcccctctatcccaatcaattgtttattatactaaaatattcgtaaggatgttcatttaaatgtcttttgcagcacaaaaccccggcgaaacgccggggtcatttctcaattcatctatcagccagattcaatagggacagtcacttaccttttttcgtttgtgtctgatcaaggagagttgctttttgcatttcagcatccgtttcggctttaattctttcctccactctgattctcccttttcccatgatctcgcctccttttttgctattataaaggatcatattttgttgtgaacatgtcgaaagacctaattttctgacgaaatgtgttctgatacgctgagtgtctttttttagttatacgcattcctcagcccggaccattccgatatggcagaaaaaattcaccagtttgtatcgcggtgcatatatggatttgatacaataacagaaatgcccatacgaggagctgacttagcttgtacatcattgcccatcgcggagcatccggctacgctccggaaaatacgattgccgcatttgaccttgcggtgaaaatgaatgcagatatgatcgaactggatgtccagcttacaaaagacaggcagattgttgtgatacacgatgacagggttgaccgaacaacaaacggatcgggctttgttaaggattttaccttggaggaattgcaaaaactcgatgcaggaagctggtacggtcccgcttttcaaggagagcgtattccgaccctggaagcggtgctcaagcgctaccacaaaaaaatcggccttttaattgaactaaaaggccatccgtctcaagtcggaattgaagaagaggtgggacagctattagggcaattttctttttctatcaataatattgttcaatcctttcagttccgctccgtccaaaggttccgcgagctttatccttcgattccgacagcggtcattacaaggcccaactttggcatgctgtccagaaatcagatgaaggccttccgctcttttgcaaactatgtcaatataaaatacacacggctcaaccgtctgatgatcggctccgtccataaaaatggcttaaacatatttgcatggactgtcaacaatcaaaagacagcggcaaaattacaagccatgggcgtggacggcatcgttacagattacccggatttcatcataaaggatggcaaacatgaaaatatatagcgcggtttttatcggaggcgcgcttggcgcctgcctccgatacggattaaacttatggatacacaccggtcagttcccggcggcaacctggctggaaaatgcggcaggcagccttctattaggcattttgaccggattttttatgatcggggcaaaacggcctctgctgtcggcttttttaggcaccggcttttgcggaggcttcacaacaatgtccacgttttctaaggaaacagtgatgcttttgcaaggacaaccctcattggctcttttatatgtggcagcctcattgatatcagggatcatatttgcactgattggtgtttttgcgggacggcgcatagcaggcattcagcaaagaaaggggctgcaggaaagatgacactagcgggtattttcatagggggcggacttggcgcaatgcttcgcttctggcttggcaatgtcataaccgccaaaaccaaaggtctcagcctgcccattggcatactgacagtcaatattctcggagctctcgggctcggaatatttacaggacttcacgttgcaaatgcttcggtctcgcttatcatcggcacggggttttttggcgcctttacgaccttttccactttcagcgttgaaagtattcaactccttatggccaaacgtgtaaaagaaagcatcttgtacatcgccctgacactttgcgggtcgcttttggcattttggtgcggctggacaatcacaatgtaaaaaaaccttgagcttatttctcgctcaaggttgcactgttcagcatcacaggctcgggcagcggcagcttgtggtgcgccgtaatcccggttgtgttgccggcttcttcttttatatcgatttgcttgattaatcggccgtccatcttcagcacctttatcgtatatgaaccgatgcgaatggattcaccagcctcaatatcgatgttttcttttaatatcagcccgccgatcgtatcgacgtcttcttgaatcgatgcgccaagaaggctgttcacctgatcgatccgaacctttccatccatcacataatggccgtcgccaagcttttggatcagcggctgttcatcttcatcaaattcatctctgatctctccgacaatttcctcaagaatatcctctgtcgtcacaagtcccgaggttcctccgtattcatccgacaatatagccatatgaatgcgctcgcgctgcattttaatcagcaagtcatgaaccgggatcgtttcaatcacttcgatgaccggcctcacatacggatggatcgtcatcttcattcgttcttcttctgtcataaacagcaaatcagaaaacaaatgcttcgtattgaccaaaccgatcacactgtctttgtctccatctgtgactggccagcgcgtgtatttttccttcagcatgacttcaagcatctcggccatcgtcatctcagttgacacagcagccatttccttccgcggtatcataatttctttggcgatccgattatcaaattcaaaaatcttattcacatatttatattcagacggattaatctctccgttttttaaactctcagataacagcatcctgagttcttcctcagaatgggaaccatcatgttctgacgcaggcttcaaaccgaacatcccgcataaaagccgcgccgatccattgaggatccaaataaacggaaacaggagcaaatagaataaacgcaaagggcccgctatcagtaaagtcagctgttctgccttttgaatcgcgaccgttttcggggccagttcacctacaacaacgtgcaggaacgtgatcaagccgtacgcgactgcaaaagaggctgcatgtgaaaccgagtccggcaagccgagcggttcaaacagtggatgcagcagccgttcaaaggccggctcacccagtacgccaagcccgattgatgtcaatgtaatgcctagctgggatgcggataaatattcatccaaatctgtaatgacacgccttgcgagtatcgcccgtttgtttccttctgtgataagctgatctattctggatctcctcactctaacaatcgcaaactcgcttgcaacgaaaaacgcggttaaagcaatgagcacgccaattaaaatcagactgtcaatatcgtccatttaaccctatcctctcaacaaaggataaggagtcacctcctgatataatcatttttccttaacattgaggtacgcggtgtattgttgcctaagcagagggccccatcataccacctccaaaagtcaaagtttgattataaattgtatattttattgtaacacaactcattccaaaaatgatttttaatttttagacttttatcatgaagaaaaccttaactgcatgcctgcttgtcaattctgcgcctgtctggattggaagaggaaggattttgcggatataaaaagaaaacagccttgaaaactgttttcttttctttgccttcttaagcaaaatctttatataaagaaatgaaaatgtcccgtgagtttttaatctgctcgatcggcacactgaaggataatcggaaatgcccgctcataccaaaaccgctgctcggcacaattaataatttgtatttttgggcggcatgcacgcaaaatgcaacttcatcttcaatcggcgatttcggaaaaacaaagaaacctccctttggcatttcaaattcaaaaccggcttcttttaaaatgtctaccattaaatcccggcgctctttataagcgctcgcgtctactcttaaatcatccattcgtgccacagcccgctgcatcatgacaggggcattcacaaatccaagcgttcgattacaatacacaaaagcgttgatcaaaaggtccgcatccggcattcggctgtccaatccgatatatccgagccgctccccggctatgccgagatctttactgaatgagctggccaatatcacacgatggtacgattgaaacggatttgccagctcttcatcatagattaattgactgtacggttcatcaaacagcacataaatcctctggccgctcttctcttctatttcttttaataaagcgcctaaatcgtctatatttttctggctgagaaccgtgcctgtggggttatgcggtgtattgaggatcagccctttcgtctgtggagtgatcgattgccttaccgcatcaatgtcgatctcaaaccggcctgtcaacgggcagctgacggcctttcccccgtagttctcaatatacaacttatattcagcaaaataaggtgcgagaataatgacctcttccccagggtttacgatgctttttaacgcaacattcaaagcgcctcccgcgcccaccgtcatgacgatacgctccgctgagaaatcagcttcaaaacgcgaccccaaaaattgcgcgactttttctctcgctgcaggaagcccttggttttgtatgtatccgtggctgcctttttcagcttcctctattaacgctctcttaaaagcttcaggcggttcaataatcgggttgccgagtgaaaaatcaaatacctggtcttccccgaactccttcttcagccttgcaccttcatcaaacagcttgcgaatccatgatcctttatttaagttttcttcaacttcccgggataacccagccaatttcatctgtcccttccgtatataaaagtttgaaaattctatcttcctatgttacttcaatcagatgatgaattccacaacttccaattccggtctgaaaaaaacaataaacttgtgcaagacaccgttcatatattaaactattctcataactataacgtgatggttgggagggatatagatggggctgagacttatcgcatcagtgaactagcggcactcgccggagtaacgaaacggacagttgattattatacgaatctcggtctgcttacgccggccagatcctgttcaaattaccgttactacgacgaaaatgcactcaaacgacttatatttattgtagattgcaagaagcagcgattggccctgtccgatattaaagatcgactggagaaccagtttccctcttcagctaaacttgatgatgaaattggaaatctggcattagaaattgatcatatgaatcaaaacatctccggaatcttgcatcggtttgaacggctgaagcccgaggatcgtgacaagctgaaaagcaaactcccgcctgaaaagctcgccgtgttccaatcatttatgctgctgttaagttaaaaccattttatctaacaggaggtgttaccttcattctcattgctagagtgaaggttctaattggacatagtgaatttgattttagttgctgttttaatcgccctgacggcatttttcgtggcatctgagtttgccattatcagaatcagaggctcacggatcgatcagctgatcgcggaaggaaataaagcagcaatagccgtaaaaaaagtgaccacgcaccttgatgaatatttatctgcgtgtcagctcggaattacattgacttccatcggattaggggttttaggtgaatcaacgatcgaaaggctgcttcacccgcttttcgtacaaatgaacgtaccaggttccctttcacatgtcatatcgtttatttttgcgtatgccattatcacgttcttacacgttgttgtcggagaacttgcacctaagacagtcgctatccaaaaggcggaagcagtgtctatgctgtttgcgaaaccgctgatttggttttaccgcatcgcgttcccattcatttggcttttgaacaattctgcacggttattgaccaaagcatttggcctggagaccgtttcagaaaacgaactggctcactcagaagaagagctgcgaatcattttgtctgaaagctataaaagcggtgaaatcaaccaatcagagtttaaatatgtaaataaaatctttgaatttgacgacaggctcgcgaaagaaattatgattccgcggaccgaaattgtcagccttccgcatgatatcaagatttctgaaatgatggacatcattcagattgaaaaatatacccgctaccctgtggaagagggcgataaagataacattatcggggttattaacattaaagaagtgctgaccgcctgcatcagcggtgaggtatctgttgattccaccatttctcaattcgtcaacccgatcattcatgtcattgaatctgcgccgatccaagacctgcttgtcaaaatgcaaaaagagagggtccacatggccattttgtctgatgaatacggcggtactgccgggcttgtgacggttgaggacatcattgaggaaattgtcggtgaaatccgcgacgaatttgatattgatgaaattagcgaaatccgcaaaatcggcgaaggccattatattcttgacggaaaagtgttaattgaccaagtaaacgacctgctaggcatccatttagagaacgaagaagtcgatacaatcggcggctggttccttactcaaaaatacgatgttgaaaaagatgattccatcatcgaagagggctgcgaattcatcattaatgaaattgacggccaccacgtcgcatatattgaagtgaaaaagcttcaagaagaagaacttctggagacagctaaccagcaggaagcataataagaaaagcaccttgtataaggtgcttttcttattttcacagttcagggcaatctctcagaacgccttatagctgatcaagcttattctctagttctttaatccgctgattcaaagcctctgtcattgctgcaagtctttcctttgaaggcaggtgggcaaaatcagcctggtgaagaggctcaccgataatcagcttcatttttccttttttgaataattcttttccgcttgaagggccctgatatgcagcggggacaagcggcgctttccccatttgcgcaatcgtcaccgcacctcttttcaaaggcacatcctcagaggttcttgttccgcttgggaagataccgacgatctctccttctttcagcagcttaatcggcgttttaatactgcttggcccgggattttcccgatctaccggaaaggcatgaattttcttcagaaacgaaccgatccatttattttgaaaaagctcttttttcgccatgtagtgtatttgataaggaagaatcccgactccgagtgtaatcacatcaacccagccggaatgtgtacacgcgatgacaaaacctgaatcggccggaaggttttctttgttatacaccttcactcctccgcgaagagaaagaataacttttaaagcatttgcacaaaacttatacatatcgcacttcctttgtcgtaatcaatgattctttctgtcatctattataacaacattttttattacctggtactaatttttaagatttctcccgttaaaacgccaaaaagctgaggattcgccctcagctttgttatatttcctctctggtcggcggggccataaactccggtccgacagggtctgatatcgtattttccaatatagtattgatatctttctgatcttcactgttcagcgtccagcctgtaatctcagatagggcctcaagctgctcaggctttcttgcaccccaaagagcgatatccgctcccggctgatctaagatccatctgacagccaagtgaatcactgattttccataacgtgtcttcgccagcttatccaattgattgacagcagaaagatactctttaaagcggggcttctggaattttggatcgtgattacgcagatcatcgccctcaaatgtatattcttcggtcattttgcctgttaacagccctctgcatatactgccgtataataatgttgttatcttgttatctttcgcgtaaggaagtacactctcttccatctctctttcaaacagattatatggaggctgaatcgtatggagaggtgcgacggcgcgaaatgtatccatttgctcaattgaaaaattgctgacgccaatcgcccggatttttcccgcatcatataattccttcatgacttcagccgtttcttcaattggcacaagcggatcgggccaatgcacctgataaagatcaatatagtctgtttgaagccgcttcaaagaattctcaacttcctctacaattctcgctctgttcgcatggcggaacagctggttgttcttccagtccagagccgttttcgttgcgagaatcacctggtctcttttgccgtactctttgattgcctttccgacgatttcctcggactgcccgaagccgtaagccggtgcggtgtcaatcagtgtaatcccctgatcaagagcggcgctgattgtttcaatcgatgttttttcgtcagtgcctccccacatcgttccgccaatggcccatgtgccgaggccgattctggaggcttctattcctgtatctgctatactggtatattccattgtgccactccttcacttttttcactatcttttcccctctggaaaaaatgttaaacatttctccgcactatcttttggggccatttttgggtactatatagtaatggtgtttgattaggtataaaaaagccgtttgcatgtaatgtgcaactttaaacctttcttatgcgtgtataacatagaggggagaaaaggcagtgacgatcgatgaaatttaccaaatgtacatgaatgatgtttacaggttcctgctctccatgacaaaagacaagcatcttgctgaagacttgctgcaggaaacctttatgcgggcatacatacacattcactcctatgatcacagcaaagtaaagccctggctttttcaagtggcgcgaaacgccttcattgattacgtcagaaagcataagaaagaagtaaccatttctgatgacttaatcggaagcctctttcaaaatgctgttcaaagtcctgcccatcaggtagagataaaggaagtgctgactggttatatgtccgagctccccgataattatcgggaggccttaacgctatattatttaaaagagttaaactacaaagaagcatcccatattatgaatatttcagaggcgaattttaaaagtgttttatttcgtgccagacagcggctgaaagcactttataatagaggtgttaatgatgaatgaagaatttaaaaagcgttttgatcaatataaaaatggggaaatgagcgaccaggaaatgactgcatttgaggaagaacttgagaagcttgaagtatatcaggaactgattgacagcgaactcgaggacgataacgattgggatctcagcatcagtcctgaaaaacaaaaagcgattttagcctacggcaaacgcaagtcttatttgcgaatttctgtgcttgccgtcatttcgacattgatgattttgccgctttgtacgctgggaagctacctctattacggaatgggtggaaaacacagcaccggcaatgagtttatggaaactgccgcagtcactgtagccctgaccatgccgaatgttcttgttgatacttccggactgaaaagccaagtgaagctatttggaatgaatacggaattcccgctgcaaaagcagattggcacgaagacggctgccgtagggaatgaacgggttgaaatgttttataacaaagtaaaagcgccggcagtaaactactatgacttagaagtgaataaaaccggccattactttacacatccttcaaacaagtctgaacaaacgaccgcaaaagcagaaaaaacgttaagcacattgcctgaaggaacggtatcagaggtctacctttcatatgaccgtgcatatccgacaaaagacgtgtataacaaattcaaaggctatgatgtgagctttttgtggaacgcaatcgaaacagagaaaaacacaaataagacagcttccacagaacctcttggctatcctggaaaggattcaaagttcctggccgcccttaatacaaaaggcaagtcgaatggcgatcagtttatcaacgccctgaaattcatgtccaaacacgaaaaatgggctcaggtcatttcaaaacggaaagatctgaatgtagataaccgattagattatgtagagaaaaacggtgtcaatgtatacggttcggtcgttacagggccaaccaaggaaatccagcgcatgctgaaaaataaatctgtaaaatcagcgaatgtcggcgaggtggaattatggaactggtaagaatttttaaagaacacaatgtattcggctggatctctgtcgggacagcggttctgtccctgctgttgctgaatttggccattatcagcaacgtcacgttttattcctatcaaatgcttccgttcgccatggctgccgttccgttcggcgttgttgaactcttcatcaagagagggcgcacaggtccaggcctgctcggcgtcatccttaatctctttgtgattatttgtgtgtataccattgtatctgtagatacgaatttacagtttggcttttaaaaaagacgccttttcaggcgtcttttttcgttataccggttttcggaacaaataactttctatagtaaaacccattttatctgtataaaatcgatgtgcgtctttacgctgcaggccagatgaaagactgacaaaaccaagtccggcttttctcgcccagtctgaggcataatccaaaagcattttgccgtatccctttgatcggcaaggtgccgttgtaacaagatccgcaatccataagtgctctcctttatgaatggaaactctcggcagagccccgcacagcgctctgattgctgtattttcatataaggcaaacagcatatacgattctttctgcacacaggcttcaagcctttgtaaatacgtctctatatccagttctgttctcaattcactcataatcggatacgactcagcccattcttctttcgaggttaattgtttcatatggatcatcttctcaatcccctttcctttcgttacaatgatcatagctaataaatggcatttgccaaatagccaatatcagaaaaaataaccatgccagataaaaaggagacacgagatggatatcacgccgtttcttgataaaaagagcaaaacaccgctgtatgagcagctttataccttttttaaacaagaaatttcatatgcgcgaatcacaaagggaacaagacttccgtcaaaacgcaggctctccagcttgctcgatgtcagcacggcaactatagaacgagcttacgagcaattaactgctgagggctatgtcaaaagcaagccaaaaatcggctggttcgcggcggaagtagaaccaggcttcccgacagctcctgaccattttcagcagtctgtacagccgggattacatgaaaagaacgcacctgctattgacttccatcaaggcaacgttgacccgaccctctttccctttaacgcatggagaaaaagcatagtaaaaagtcttgatcgctattccggatcgtttcacacctctggcgaccctcaaggagaatacgaactcaggcacatgattgcccgattcgtcaggctgtctcggggagtaaattgtgaacccggccagattatcatcggcgcaggaaccaccgtgcttctgcaaattctttgcctttcgctaaagccaggtacaaaaatcggctttgaagaaccgggctttcaccgttcaagaaggatgtttgaagcaaatcacatggatgtcactccgatttgttctgatgcagaaggcgtcctgccggatgagctctaccgtcagaatcctcatctcatgtatacgactccttcgcatcagtttccgattgggaccattatgacgattacccgcagacaggagctgctggcatgggcggcagaaacaaattcattcattatagaagatgattacgatggagaatttcgctacagcggccatcccattccgtctttacagggtcttgatccgaatggcagagtcatatatctaggcactttttcaaagtcacttctgccttccttgcggctcagcttcatgattgtgccccctgaactcatggaaccgatcaaaaacaatgctcagttaatgaagcagaccgtctctgttcactcgcaattggcactggcagacttcatcgaaaccggagagtggcaaaaacacataaatagaatgagaagcttataccgaaaaaaacacgctgtcctgttagaagccatccgctctgaactaggaaacaccgttgagattctcggtaagaactcggggcttcacatcctgctgcgccttttgtttccagcaagtgaggaagaagcaatacaagcagccgctgaccacggtgtaaccctctatcccgtgtctccctcatatatagaacagacgccttttacttctgtcttaatcggttatggcggtttgtcagaagaggatatcaggctcggcatccaaaaactgaaaacggcatgggcaccgttgatatcatcttattaaataaaaaacaggccccggaaacggagcctgttttttaaaatgataaaattccgattaaatttaagaacacgataataatggcaagcggcacgataaaacgaagcaaataaaaccatgtgtaaaagaatgctttacctgcatttgatccatttcgcatttcagccaagagttcgcttttcgaaattttcagcgggataaatagagaaattaacaaagcgcctgaaggcatcaaaacattgctgacggtaaaatcggcaatatcaaaaaacgttttgccaaataggtgcacatcactcaaaacgccataagacaagcagcatgggattccgaccaaaaagatcaaaagcccgctcgtccatgacagtttttttctcttcttttcgtccccttttccgattgtggcaacgataatttcaaccatcgaaaatgctgaggttaaggctgcaaataaaaatgcaacgagaaaaccgataaaaaacaacgtgccgaacggaagctgttcaaaaacggccggaagcactgtaaacagcagtgtcggtccttcatttggctgaaaaccgaatgagaaaaccgccgggaaaatagccaaacctgccaagagtgtcacaatgatattcatcaagacaatggaggctgccgaacgagggatattttgtgttttcggcaaataggagctgtaggtcaccatcaccgaaacccccagtgttaacgtaaagaaggcctgtcccagcgcgaataatatggattccggagtcagatcgccgaaatgaggcacaagcagaaactttacgccttccattgcaccattaagcgtaagagaccgaagaacgagcagaataaacaataaaaacaaaatcggcatcatcaccgcgcttacccgttcaatccctttttgaacccctcttgcgacaacgatgacagtaagtaccataaagacaagctgagccgcgagcgtctgcaccggattttggataatagaagcaaaaagagcgccatactgtgcttgagaaagcccggacagtgagcctgacgccgtttttacgatatacagcaaaatccatcccccaattacactgtaaaacgacagcactaagaaacacgcggctacgccgatccaccccgtaagaaaccaagctgatcgcggcgcttcttttttatatgcatcaatggcattcgtctggttccgtcttccaaaaataaattcccccaccaaaagcggatagcctaagaggatggtaaataacacgaagataagaaaaaaggctcctcccccattggtccccgctacgtaagggaacttccaaatcgcgcccaagccgatagccgagccggccgctgccatgacgaaaccgattttcgaagcccattggactggtttttgctcagacaataaacgtcacttcctttccagcctatattatctcttatttttgtcttcatttctatagattcatttgcgaagaacagaaaagagagcggcctgtatggccgctctctttatcaaaaggttattgatttaattttgaatgctttcttgaatacaggaaatagattaccaagccgattaacagccacactaggaagcgaacaatcgtcacccaccccagatttaaaatcaagaacaggcagaacagaatcgccaggcctgggataaacggaactcccggacatttaaaggctctcggaagatccggctgtttctttctcaaaacgataactgccacagaaatcaggacaaatgccgacagcgtcccgatgtttaccagctttgcaagttcatccagcggaacaagtgagccgagaagcgccgacatcgttccgaaaaaccaagtggctacataaggtgttttgtgctttggatgcactttagaaagtgagcccggcacaagcccgtcacgcgacatggcaaacatgacgcgggtctgcccgtaaagcatgacgagcataactgttgtcattcccaacactgcgccaatatcaatgatgcctgccacccaattttgccctgcgctttgaagaactagagaaactggatgatccacacccgcaaattgagcaaacgggataaccccagtcatgatagctgatacggtgacatataaaatcgtgcagaccagtaaagagaaaataatgcctttaggcagatccttcgcgggatttttcgtctcttccgcagcagaggatacagcgtcaaatccgataaaagcaaagaatacgagcgccgctgcactgaacacgccgccaaagcccattggcataaacggctgccagttgtgcggcttcacgtaaacggctgccaccgcgataaacagcagaacaaccagtatcttcaagataaccatgatattgttgactctttttgattctttgatgcctaaataaagcaaatatgtgatcgccattacaatgacgaatgcaggaagattaaacagggtaaaggtacctttcactgcgcccggtgccgctgttaaagcaaccggaagatgaatgccgagccctgataaaaacgattggaaataaccagaccagccgaccgacactgcacttaccgccaacatgtattctaaaattaaatcccacccgataataaaggccataagctctcccaatgtcgcataagtgaatgtatacaccgaacctgaaacaggcacacttgacgcaaattccgcgtaagacagggcggcgaataaacaagccagcgccgccacaacaaatgaaatcgtcagcccgggaccggccgtgactgcacctgtccccgtcagaacaaaaatccctgtgccaataatggcgccgattccaagcaacgttaaatcaaatgcccctaattctctttttaaagacttttcaccgctcgtcgcagcgattaaatcctgaatgcttttcttcctaaaaacgctccctttcattccccttcaactcccgatcctctatttttatatactttatttgaattttctgaattcatgagcaacaatggtcatttttctttttttctactatatttgtactggtcgcgaatcattcctttctcctactcaatattatatataaaattgcaaaaatgaaaacaaaattgttagaaaaatcgacaaattttttattttttaaatttttgaccatacaaaaaaaccagctctggagctggtttttcgttgattacgttgaaataaaacggccgccattcacatgaatggtctgccctgtcatataggaagattcgtcagacgccagcagaacataggcgcctgcatgctcaaccggctgtcccggtcttcccattggggtatccaagccgtgctgtttcactttttcctcagggaatgtcgccggaataagcggtgtccaaatcggaccgggcgccaccgcattcactctgatgcctttatctgcaagcgacttcgccatggaacgcgtaaaggagacaatcgcaccctttgtgctggaataatcaattaacgccgtatccccttcataagcggtaatcgatgtcatatttataatggcactcccctcttccaggtgaggcaaagctttcttcgtcatatgaaacatggaaaaaatatttgtgcgaaaggttttttccagctgttctgttgaaattttgagaatgctgtcctggggatgctgttcagcggcgttgttcaccaagatatcgagtttaccaaaatggtccactgtttgctgcacagcttgttcacaatggttctcgtccccgacatctcccgggataagcaggcagcggacattctccttttcgatccgtttacgtgtttcctctgcgtccgaatgctcgtctaagtatagaatggagatatcagccccctctttagcaaaggcaatagctgctgctctccctattccgctgtcgcctccagtaatgatcgcgacttttcctttcagttttccgcttcctcgataatcctcgtcctctgacagcggcagcgggttcatttttgattcaatgcccggctgtctgtcctgatgctgcggttcttgtccttctgtttgtctgtccattgggttcacattcatcactcctagacatgtggttgatactgaacgttaccacacgacagaaatgaataaacgccaaaatatgttatgaaagtacttcctcgggaatggcaccggtatatttcgctgacgggcggaaaatcatgttgttttctgcctgttccagcacatgggcgcaccaccctaccattcggcttgctgaaaaggtcggagtaaacaattcatcgtcaaaatcgatggccttcatcactgcagccgcgtaaaattcaacatttgtgtacagctttcgtcccggtttgtagatttcaagcaaacgaatcgcttctgcttctacatgcagcgcaagatcaagatcacggtcattgccggccacctcttctgctttctgtctcaaagcttctgcccgcgggtcttttgttttgtacaccctgtggccgaatcccatcaagcgctctcctttttcgagtttttctttcagatatgcttcagcatgttctttttctccaatgtcttcaagcatttttgtcaccgcagaaggagcgcctccgtgcagcggacctttcatcgtgccgagagcagacgtgacggctgacactaaatcactctctgttgataacgtgactcgtgccgaaaaagtggatgcgttcatgccgtgctccatggccagaatcatataggtttcaagcgctttcttttttgcctctgaaggctgttcacctgtgagcatataatagtagttttcgacatgtccgtactgggaagaaggtgcaattgcttgttcaccgcgcgtccatctttttctgtatgcaatgatggaaggcgtgattgcaatcagccggattgcttcttctgttttcggatggaatgtgtacgtattttcccccaatgctgaaacaaccgttctcagcaccgacatatcgtccatgttgtttggcagtgattgaatcaagcgctcaatgtgttccggaagattccgttccgcagccagcttacctttaaatacctgcaattcttcagttgaaggcagtttcccaaataaaatcaaataagctgcttcttcaaagctgtgattcagtgcgatgtcttttgcatgatgtcctctgtaaatcagacgccctttttcaccatcaatatggctgatggatgtttccacacatgtaattccctttaatccgtaatgtaccatttgtattccccctatccttttctgttattatagtaaatataatatttaaaaaataatgaatattttaaagggaattaattaaaaatattaatcagagggagaatagaaatggatttcaaatggcttcacacctttgtgaccgctgcaaaatatgaaaacttccgaaaaacggcggaaacgcttttcttatctcagcccactgtgaccgtacatatcaagcaattagaaaaagaaatcagctgcaagctgttcgagcgtaaaggcaggcaaatccagctgactgatgaaggcagggcgtatttgccgtatgcgctcaggcttcttgatgattatgaaaacagcatggcagagcttcacagagtgagacaaggctactctcaaaccttacagctcgcggtttctccgcttattgcagatactgtgcttccttctgtcatgaaacggtacacagcaatgaatacggaaacagaaatggcggttacgattttcgaatcagcggaaatcgcgtcactgattaaagccggggaagcagatatcggactaagctgtttaaaggtacaatcttcttctttaagctgccactgcttatacaaagaccctgtcgtccttgttgccccgcccgataagcgtttcatagaagacaacgaaattgatgccaaagaggtgctcgaacaatacctgcttttgacccacaatcatcctgattactgggacgacttgctccgtcaagtcagaatgacatttccatttgtgagaacaatgaaggtcactcaaacacatataacgaaacggtttatcaaggaaggactcggagtttcatttctgcctttatctacagtaaagcgtgagttagcagagaaacagatgatcagaattccttatcagtctgtacagctgccctatgccggcgcttacgcgattgccctttatgaaaataagaaagaaaaaaaattcttggattttttatcacattttcatttttaggagcaaccaaaacgcctgtgctccgtctaatgaaaaaaacccgttccaatgaacgggttttctctaaaaattagaatcttttcgcaccgaggtaacgaggcttccagtagctgttgttcaggctgctgatttgtacgccgtcagatcctgcatgaatgaaactgttgtttccaatgtaaatccccatgtgagaagggccggatttatatgttgtgaagaagacgaaatcaccaacagacgggctggcaatgctcttcatagaactccagtatcctgcagtgcttgttctgcccacacttgtttgtttattcagtacgtaccaaatgaatccgctgcagtcaaagccggaagttgtcgttccgccccatttatatggcgttccgactaacgcttttgcatcagaaaccagcttgctcacattaagtgatgtagatgacgttttgctgcttgaagacgatgaagatgaagcaggttttgagctgcttgtgcttgttcctttcaccttcaatacttggttgacatagattacatctgattttaagccgtttaagctttttaatttgctaaccgtagtgccgtatttgctcgcaattttagaaaggctgtctccgctcttcactttataagtagaagttgaagacgatgacacttttgatgagctggagctgcttgaactagttgaacctttcagtttcaggacttgtccaacacgaagcaaatctgattttaagccattcagcttcttcagttcattgattgtcatgccgtatttttttgaaattttccaaaggctgtccccgctctttactttgtatgtagaagaagaggaagaagaactgctgctttttgaacttgtagatttgccgttaatcgataaagtttgtcccacataaataatatctgaacgaaggtggttctctgatttaattttactgatcgttgtgtcgtattttcttgaaagatcccataacgtgtcgccttttttcaccttaatgctttgtgcagatgccgctcctgcaaataacgtcgatcctaaaacaactgctgtcgtagctgtaatgatttgctttttcatattttcctccccaaatgttaactctctatatatgtatctcttttttaattaatcttattgatttctattataaggatagattcccatcagaaatagtcttgacttcatgtgacaaatttcttaattattcgttctaaaaaaaagtttttaagggtattaaatatttcattttcgttgcaaaggtgacaaaaaacgagtgcttttgtcatgttttatgggatgtttttcaacataaaggaaataaatgaaaaactttcggggtcggctcacataccggaaaaatgagtgataaagaatattcgaggagagttgcggttatccgcagtttttttatttaaacaaacatatcatgcaaagacagagaggtaaagatttttctgaaaaatgaatgctttacatcaaataaggcaagataacgaaaagcgttttttcatttccttacaagactttacttattgtttacatgatcaacagccgcatttaacaaaatttccctaacatgataaacggaatacattaaaggaggcatgaaaaaaatgagtttgtttcaaaatatgaaatcaaaacttctgccaatcgccgctgtttctgtccttacagctggagtctttgccggagctgagctgcagcaaacagaaaaggccagcgccaaaaaacaagacaaagctgagatcagaaatgtcattgtgatgataggcgacggcatggggacgccttacataagagcctaccgttccatgaaaaataacggtgacacaccgaataacccgaagttaacagaatttgaccggaacctgacaggcatgatgatgacgcatccggatgaccctgactataatattacagattcagcagcagccggaacagcattagcgacaggcgttaagacatataacaatgcaattggcgtcgataaaaacgggaaaaaagtgaaatctgtacttgaagaggccaaacagcaaggcaagtcaacagggcttgtcgccacgtctgaaattaaccacgccactccagccgcatatggcgcccacaatgaatcacggaaaaacatggaccaaatcgccaacagctatatggatgacaaaataaaaggcaaacataaaatagacgtgctgctcggcggcggaaaatcttattttaaccgcaaggacagaaacttgacaaaggaattcaaacaagccggctacagctatgtgacaactaaacaagcattgaagaaaaataaagatcagcaggtgctcgggcttttcgcagagggagggcttgctaaggcgctcgaccgtgacagcaaaacaccgtctctcaaagacatgacggtttcagcaattgatcgcctgaaccaaaataaaaaaggatttttcttgatggtcgaagggagccagattgactgggcggcccatgacaatgatacagtaggagccatgagcgaggttaaagattttgaacaggcctataaagccgcgattgaatttgcgaaaaaagacaaacatacacttgtgattgcaactgctgaccatacaaccggcggctttaccattggcgcaaacggggaaaaaaattggcacgcagaaccgattctctccgctaagaaaacacctgaattcatggccaaaaaaatcagtgaaggcaagccggttaaagatgtgctcgcccgctatggcaatctgaaagtcacatctgaagaaatcaaaagcgttgaagcagctgcacaggctgacaaaagcaaaggggcctacaaagccatcatcaagatttttaatactcgctccaacagcggatggacgagtaccgatcataccggcgaagaagtaccggtatacgcgtacggccccggaaaagaaaaattccgcggattgattaacaatacggaccaggcaaacatcatatttaagattttaaaaactggaaaataaaaaggatgcagaacgctgcatcctcttttttataaatatctgcggtgaacaccttttccgtcgtacgaaaacatgacttccttatcctcaagcacagactcaatgtgcacgcttcttccccaaagctggaataaataagggagcactttctccaaatatttcaaatctaactctattccttcataccaatgcttaatatagagctcgttatttttcatataatcgccgtcgtttactgtcaaatatggaaaaccgccatttacccgcatgcttacgagctggtcgcgcaccgacttccactgtttatcgatgattttataatctcggccctgtttttgaaacaaataaagatcctcgcgcatgactaattctttggttaaataattgcggatgaaagagatatcggattcaatctccctgacctcaaacattttctcccggccggagtcaggctgcacgcccattttcttcatttcctccgtcgggttgttgtacctctcctcaatgtcttcaaatatttttagccctaaataataaggattaatgcctgttttggacggctgaacgacacctgcattcagcttggcgaactcgatcgcttcatcagaggttaaatcaagctcacgtataattcgctggtgccaataggaagcccagccctcattcataatcttggtttccagctgaggccagaaataaagcatttcctctctcatcatcgttaatatatcacgctgccatggctccagctcccgggaatgctcctcgataaaaagcaggatatctttttcaggccgcggcgggaacggttttttcgattttttcacttgttttttcggtttcttttcatccaatgaccatagatcatcgtaaggcgtggctgcctcttcaatctcctcttcctcatcatccacactccattggagctttggtcggaccaacgacggatcgatatgctcctgaatcgaaaggattgcatctaaaaaagattcgacttcttttatcccgtgaacctgttcatagtgttttatccgttcagctgttgccgccatgctttccaccatatcgcgcttcgtgttttggaaacggcagttgtttttgaagaaatcgcaatgagcaagaacgtgtgcgacaatcaatttattttggatcagtgagttgctgtccagcaaaaaagcgtagcatggatctgagttaatgaccagctcatagatcttacttaaccctagatcatagtgcagcttcatcttgtgaaactgcttgccgaagctccagtggctgaatcttgtcggcatcccgtacgcgccaaatgtataaataatttcagccgggcagatttcatatctcatcgggtagaaatcaaggccgaatccttttgcaatttcggtaatttcctcaattgcccgctgtaatcccttcttctcctccgcgttcaaccgaatcccccctacttggacttatctataatgtatgagcccgccagacaaaagatgatagtctcactcgggcaagaaaaaattcccccggcacattcatctgtttgcttattggataagtgggtaaacacacaccatactacgaaaaaggagcgataccaattgaatgtagcagacgtgttttcttcttatctcagtaagctgccaaacgtaatcattgctttactcgtcttattaatcggctgggctattgctaaaatcattgaaaaagcggtatacaaaggactcagcaaaacaaaaatcgacgacaagctctttgctgggaaaaagccttcacgctattcctcggaaaaagtcataagcaaggtcgtttattttatcgcactgatcatcgtctttattttattctttaacattttgcacctgacaacagtggcatcgccgtttgtcagtatgctttcggcgattgcagccgcgatcccaagcgtgctgaaagctggactcattctgctgttaggatgggctgcagcctctgttttaagcttccttgtcaaaaaaatcgggatgaagctgaacacgagtgacaaactgcgcaagtggaatttggtgtctgaaggaaaagatattcaccaggctgtcaataccgcttcacaaattgtcttttatctcgtgctgcttgtttttctgccaggggtcttatcttctttgaaaatcagcggcatttcaggtccttttacaaatatgatggaaagcgtgctcgcttttctgccgaaattatttgcagcggcgcttatcgtattaatcggctggcttgttgcccgccttgtccgtgatatcattacgaatttccttgcaagcatcggcacggaaagattcgcggcacgtatgggtttatcaatttacttaaaagacacaagcctttcagcagtcatcggaacaatcgcttatgtgctgattatgattccggtggtcatttcagcgcttgatcagctggatgtcgccggcatttcaaaaccagctgtctctatgctgaatacgattttaaacatgcttccgaacatcatgattgccatcgtgcttgtattagcgggtatctgggcaggaaaatgggtgaaatccatggtgtccggactgctccatcgcgcaggctttgattctgtcttagggaaaatgggcatggaagccggaacgcctgcaaagctgtccttgtctcaagttgtcggtatgattgcgcaaatcattgtcattctgctctttacagctgaggcgcttcaaattgttcggctgcacttcctcgtagaaattgccactggcatcatcgcgtatctgccgaatgtccttgtcgccgtattcattctcggactcggcctttacgcaggagaattggtgagaaaagtgctctcaagcatgataaaaggccaggaattcaagtctttagcgcctattgctaaatatacgattatcgcacttgctttctttatggccctggatcagcttggtgtcgctgcgacaatcgtcaattccgcgtttatcatcgttcttagcggcttcgcactcgctttcggtttatccttcggccttggcggtaaggattttgcatcacgttatctgtctacatttgaacgcaaaatgcaaaacacagaaatcgaaaaaaaccgtaaaaaccaaaatccgccgaatgacatgtaagcaaaaaacatgcacccagctgggtgcatgtttttttaattcctttttttcatttttcaatcgattatgataagatatagaaaatgtcttattctgaggtcttattatgaagttaaccaattatacagattattcattaagagtgttgatttttctggctgcagagcgtcccggagaactttcaaatataaaacagattgccgaaacgtattctatttcaaaaaatcatctcatgaaagtcatatacaggctcggccagctcggctacgtagaaacgatacgcggacggggcggcggcatacgattaggcatggaacctgaagacatcaacatcggtgaggttgtcagaaaaacggaggacgattttaatattgttgaatgttttgatgcgaacaagaatctctgtgttatttccccggtttgcggcttaaaacatgtgctgaatgaagcgcttttagcctacctcgcagttttagacaaatatacactgcgcgacctcgtcaaaaacaaagaagatatcatgaagcttttaaaaatgaaggaatagatcaagattccttcttttttatgccctttttcccccttattgttaagataatttggctatttttataaaaaggcaaaacgatgagacaaatgtgccgatataaaaaagaaacagcaaatgcaaaatcattgggggaaaaaggagagctaagatgaaaaagaaattagcagcagggctgacagcatctgcgattgtcggcacaactttagtagtgacaccagctgaagcagcaacgattaaggtcaaaagcggagattctttatggaaactggcccaaacctataacacaagtgtggcggccctcacatccgccaatcatctttcgactactgttctgtcgatcggccagacgcttactattccaggcagcaaatccagcacttcttcatctacttcaagctcaacaaccaagaagagcggaagttctgtttacacagtgaaaagcggagattcactttggctgatcgcaaatgagtttaaaatgaccgtgcaagaactgaaaaaattaaacggactaagcagcgatttaattcgtgctgggcagaaattaaaggtgtccggtactgtttcttcaagccctagttccagtaaaaaaagcaactctaataagagttcaagctccagttcaaaaagcagttctaataagagttcaagttcctcatcttctacgggaacatataaggtgcagcttggagattcactctggaaaattgcaaacaaagtcaatatgtccatcgctgaattgaaggtcttgaacaacttaaaatcagacaccatttacgtgaatcaggtgttgaaaacaaaatcaagcggctctgatacgtcttctaaagacacttcatccaaatcgaaccaaacttcagcaacaactaaatataccgttaaaagcggtgattcactttggaaaatcgcaaacaactataacctgactgtacagcaaatccgaaatatcaacaatctgaaatcagatgtgctgtacgttggacaagtattgaagctgacaggtaaagcatcttcaggctcttcatcatcgtcgtcttcttcgtcaaatgcaagctccggcacgacgactacatacacggtgaaaagcggtgattccttatgggtgattgctcaaaaatttaatgtaacagctcagcagattcgtgagaaaaacaatttaaaaacggatgtcttgcaggttggccaaaaactggtcatttccggaaaagcttcatcatcgtcttcatccggttcttcaaacaccaccagctcaacgagtgcgaagattaacacaatgatttcggccgctaaagcgcagcttggggttccgtatcgctggggaggcacgacaccgtccgggtttgactgcagcggattcatttactatgtactgaacaaagtcacttccgtatctagattaacggcagcgggatattggaacacaatgaaatcagttagccagcctgctgtcggagatttcgttttctttacaacatataaagccggcccttcccacgtcggaatttacctaggcaacggggaattcataaatgccaacgattccggagttgtcatttccaatatgaacaactcttactggaaacagcgctatctcggtgcaaaacgatatttctaaaaacagaaactgtgcggccttaacggctgtacagttttttattagagcctaaagacgttgatgctgatcatatgatttgtcaccggatgaaaatagacttcggcccgaacagaaaaagtgtcatctttctgtctgactgtcacccgaaagacatctttcgtctgctgatcattcacctctgtacgccccatataagcataatcagaaaatgaagcgcccttatattcatcctgaattttgctccaggcaagctgttcccacttttgaacggactcgtctgtgtccgttgaatgaccttttgcagccattgacacgataatcaatccgcaaaaaagaagcgcgatggtatacggcagggatttcattttttcagtctcctgtacccagaatatgttccctcataggtttaccaaaagcgatatcttcattcaggcattttgattttatgtctccctcatattgctacccctttactgccgcagacgccaagttttgccccgtcaataacagaggatgcggcataaactaatcatgaacttctcacccaagaaaggagaagcgattcatggattatgccgattacgataaagcgctttattacacccatcgttctcaatgggataatttattaattttaatggtgcgtacagaggacgatttgttatcaaaacgaattgagcattttctgcatgcgtatcattttgaacaggattacgccgttttagaaaagatgctgtattcccttctccgttatattgatcatgccacagagctgacttatgaagatcaaatagcccttctcacataaacaaatcccggcgtttagacgccgggatttcctgcttttgcgaacatgctgagttcttcgacaagctcttttatgctttccttaatgttttcagccactgtagcattttcaacatcaatatgcaccggatcaagcaccagctgcttcggaatgacattggcgtagacaccccgcatcacagttctcatattgttcagcgcattgatgccgccttttccgcctcccgctactgccaataatgcaacgggcttatatttgaattgttcgctgcttagaaaatccaaggcattttttaaagcgccgctcatgccgctgtgatattcaggcgataataatacaatcgcatccgctttcgtaacgcgttgcttaagctcctgtaccttcaacagttcagattgatccgcttcaccgttaaaaaccggcaatacaaactcgcttagatcaatcaaatccgtgtgatacagagctgcaatataggatgctgcaattcttgttctgccatgttttcttggcgtgccatttatgactaacatgttcattttgagatctctccattcaggttatatttcactgcgaaaagcgctgcttgcgtgcgatcggccacttcaagttttgctaaaagattcgatacatgggtttttactgttttttctgaaataaacaaggctgctgcgatttctttattgcttttcccgttcgctatttcagtcagaacgtctttttcccttctagttaattgatagtatttttctttttccgggtcgtgctgatttttcatatgtgttagcacatggggcataatagctgtagaaagcttgtattcgccaccatgcacttgtcttagtgttttcaccaattcctcgggctccgtatcctttaattgatacgccttcgcgcctgcctgaagcgcggggatgacgtgctcctgatcagagtagctcgtcagcacaatgatattcgtctgcggaaattgctgtattgcttttttaatggcttgaatgccgtccatctcgggcatagacagatccattagcacaagatccggctttgtctcttcgatgacacggagagcttctattcccgttgcagcttctccgacaacttcaatatcatcctgggtggcaaagaaaaaacgcagaccctttctgacaacatgatgatcatcagcaatgacaattttcataccgcccctccttttcggcttgttagcggaagcctgatggacagctttgttccagttccaagcgctgactcaatccaaaacttagctccggctttttccgctcgttctttcatacccttgatgccaagtgaaggcagatcggcatgggcttcatagcgaaatcctgccccatgatcgatgatatccagctccgcatggcacaaagaagcagtcagactaacatacgccgtatccgttccggcatgctttttgcagttatttaaagcttcctggacgacacgccatagcatatgctcctgctcatcagtcagaacaggacagcctttttgtgtaaaaatgatcttcaatccaatgagcgcaccatagcttttaatggcttcagccagccctttttccaatcctccggggcgaagctgccaaattaacgctttcatttctgcgagcgcgtcctgtgataggttttggatgaaatcaatcatctgctgtaaattttcatcttttgttagtgtcttcgcagctttggcagttaaactgacggaaaacagcatttgattgactgaatcgtgaagctcctgagcgaggcggttgcgctccattaaaagagcatttttttgttgatattcagaaagcctcatacgctggattgccgttccgatctgaaaggcgacagactcgagtaaatgcagctcttcctcatcaaacatggtttttccggccgccgctacatttaacaatccgaatcttctgtccccgtcttctaaaggcacagttgcatgatgcgtaatcccttctgtgtcaaaacaatgcaggttttctgctgattcgatgcgtttgcagttcatgatatttgcagcctttctaagccctccgttattgaatttcgtcaggcagtaacactccccttcgcacatcagcactttttccttgcggcttaaagccgggggcagataagcgtcggccgctaacgtataagacccatcttcttcgatcagaaaaatccatccggattgaaggtttgtcagactcaacaactcttttaaaacctcatccagtgttgctttgatatcgtgcccttgatttaaggtttccgcaatcgttttcagcgtttttaatttttccatcctcgttttgctcacgtttctcactccggcattgatcttgtatttaagattataccagttttttgtatttcattacttcactgatgggatgattttctttcagacttttggatgagaaaaagaaaaagctggatcatttacaatgacccagctcatacttgaattattttgccgtcgactcaacaatttcatcaaccgtcttcattacatcttcagaaaggacggcaagtcgcttttcactgtcttccaaagatgacccttttacggcgaaataaaatttcaccttcggctcagttccagaaggacgaagacagaaccaagacccgtcttccaggaagtatttcagtacatttgattttggcaagtcgatagcttcttctttgttttcagtcagaagcgtccgtgtgcttacagcgtaatcttctgctgtgacaacctgtttgcccgccattttctgcggcggattttgtctgaaggaagcaagaatcgcttcaatttgctctgctccttgtttgcctttcagcgtcagggatttcagcccttcacgataaaaaccatactcgttaaagagattgatgagcgcctcatacaatgacattccctgttttttatagaacgcgcaaacttcaactgccaaaagcgcagcctgaatggcgtccttatcgcgggcaaaatccccgattaaataaccgtagctctcttcataaccgaattggaaggtatactggcctgatgcctcgtattccttaatcttttcaccgataaacttaaagcctgtcagcgtatcaatcgtatcaaggccgaatgaagaagctacagcacggccgatttcgcttgtgacgatcgttttgagaacaacaccattatcaggcaggatgccttgttttttcttttcagaaagcaggtaatgaagcagcagcgctccggtttggtttcctgtcagcactgtatatttgccttgatcgtttttcaccgcgatgccgaggcggtcagcatcaggatctgtcgcgatgagaatatctgcattctgctcctccccatgcttaatggcatattcgaatgccgcatgctcttcggggtttggcgatgtaacagtggagaagtttgaatccggcagttcctgttctttgacaaccgttacatttttgtagccgagtgcttcaagtccgcgtctgaccggtttatttgcagttccatgcagcggtgtgaaaacaacctttacatctacttcttccgataattcaggatgtacagaaatcgacgtcagtttttctgtataaactttatcaatatcttcaccgatgattttgattaagcctttttcttttaacttattttcttcgtccactgtgatcgtcaactcattttcaatcgcgtttacctgctcaatgacgatgtccgcttcctttggaggcagctggccgccatcatccccgtatactttgtagccgttatattcaggcgggttatggcttgccgttaccacaattcccccataagcgttcagctgtctgacagcgaatgacagctctggcgtcgggcgaagctcatcaaacacgtatgtttgaatgccttgtgtcgcaagtgtttttgccgcttccatcgcgaactccggagatttatggcgggaatcataagcaatgacaacgccccgtttttttgcttcctcaccttgcttcgagatgtatgccgcaaacccggccgatgctttgcgcacagtgtaaatattcatccgatttgtcccggcgccgatttccccgcgcattccgccggtaccgaattcaaggtctttatagaaacagtcctcaagggcctgttcattcccctctaattcaataaggcgctcttttaattccgggtctaaatgttctgtctgtttccagcgttcatagctctttctccaagtcatattcgtcctcctatgtatcagcttatgccattattttatatgaatcgggtgcctctgtcacttgataacctgagatctggccctttcggcacgtaaaaagaaataacgggctgcagacagcccgttatgatttattgctcaagcggtacgaccgcatcgtgtaaaagcttgttgaggttttctgtatgtttgtttttcgcctgctcatcccattggaatcgctcgctcataaaatcaataacggcatctttatatgttcttacccaattgatatcaaaaaataaacgtcccgttctgcggacaaagaagtcagcaggggttgcagtcatctcttcttctatactgtattctgcctcagcaagaatatgaaccggaatgttgcgtttcgcggcctcatctttcagcgcttctacccggtcaaagacacgatctacgttagagccgtatctgatcgcaagctgttttgcgtctttttctgataaaccggctgcaattccttcttttgttttcgcggtaacgaaggacataagattttttgaaccgccgacgtgcccgccagagattggcatgtttttcgttttacatggtccaaaatccttttcgccctcttcttttaagcgatcacggacaagatcaacgatgtgctccgccatttttctgtatccagtcagttttccgccggcaatggtgatcaggcctgagtcagatgtccaaatctcgtctttccgtgaaatttcagaaggatctttgccttcttcatgaatcagcggacgcagccccgcccagctggattcgatgtcattcgcagtgatattcagttccgggaacatgtaattgattgatttgatgacataatcacgatcctccgttgtcatccgcggatgctccagcgcctctttgtaaacagtgtctgttgttcccacgtatgttttgccttcacgaggaatcgcaaataccatccggccatcaggtgtatcgaaatatacagcctgtttcagcggaaagacagactggtcaaatacaaggtgaatgccttttgtatgctgcaagtgctttccgtttttcgaatggtctttttctctgagctgatcgacccaagggcctgtagcattgacaatttttttcgcatacactttatattctttctttgtcagcacatcttcaattaatacgccgacggctttgcctttttcgtaaagaagctccttcactttggagtaattcacaggctctgccccgaatttcaccgcttccttcatgacttcgatggtcagtctcgcatcgtcagtgcggtattccacatagtacccgccgccttttaagccgtctttttttaccaaaggttctttttgcagcgtttcttttgctgaaagcatgcttcttcgttctgactttttcacacctgcaaggaagtcataaacccttaacccgattgatgttgtaaatgaaccgaatgtgccgcctttatgaaacggaagcagcatccattccggtgtagtgacatgcgggccgttttcatacacaatcgcccgctcttttcctacctcagcgaccattttcacttcaaattgttttaaatagcgcaagccgccatgtaccagcttcgttgatcggcttgatgttcccgccgcaaagtcctgcatttcgcttagtgcgaccttcattccccttgatgccgcgtcaagagctgttccggctcctgtaattcctcctccgataataaataggtcatatgtttttttcgtcatgtctgtcagcatgcgatctctttcaagacttgaaaattgatgtttcatcattacgtctcctccttgttgtcacggtaaatagaaaaagagaccacaacagccaaagtgcatgcttacactttggtgctgtggtctctcctcatctcaggaccgttcttattaacttgtaaccattataccatagtattactttatttaaaagccatagctgctttcacggctttttgccagcctttatacagctcatttcgtttttcttcttccaattcaggctcaaaccgtttatccagattccactggttcgcgatctcagaacggtccttccagaatcccacagcgatacctgccaaataagccgcgccaagtgcagtcgtttcattaatttccgggcgctccacaggaacattcaacaggtctccttggaactgcattaggaaattgttttttacagctcctccgtctacacgaagcgtctttaatgaaatgtttgaatctgcttccattgcgtcaagcacatctttggtctgataagccaatgactccagtgtcgcacggataaagtgctcttttgttgtccctcttgtcaggccgaaaaccgaaccgcgcacatcgctgtcccagtaaggcgttcccagtccgacaaaggccggaacgacatatacgccgtcagttgaatccactttctctgcataagattcgctaagcgaagagtcctggaacattctcaatccgtctctaagccactggatagcagagccagcgacaaaaatgcttccttctaacgcatagttcacttttccgtcaatgccccaagcaattgttgtcaaaagcccatgttcggacttaattgctttttccccggtattcatcagcatgaaacatcctgtgccgtaagtgtttttccccatgccttcttcaaagcatgcctggccgaacaatgcggactgctggtcgcctgccgctccagcaatcgggatattttttccgaagaagtgataatcaacagtctccgcatacacatgagaggacggcttcacttcagggagcatggatttcggtacgcctagaatgtcgagcagttcatcgtcccattttaaatcgtaaatattaaacatcagtgttcttgaggcattggagtaatcggtcacatgcgcttttccgcctgacattttccaaatgagccacgtatcaatcgttccaaacagcagctcgcctttttccgctttttctcttgcgccttccacattgtctaaaatccacttcaccttcgtgccggagaagtatggatcgattaaaagcccagttttttctctgaatttatcattataccctttttcacgaagttcctcacaaatgccggacgtctgtctggactgccaaacgattgcattatagacaggacttcctgtatctttatcccacacaaccgtcgtctcgcgctggttcgtgatgccgatgccggcaatttgagaagcgctgattcctgattcagagatgactgaggcgataaccgcgaggacagagccccaaatttcattggcattatgctcaacccagccaggattcgggaagtattgtgtaaattccttttgagcagagtggacaattttgccttctttattaaacagaatcgctcttgaacttgtcgtcccctgatctaaggataaaatgtacgtttccataagatgtctcccctttgattaaatatatttagaatttgataatgttttagcagaatgtgatttcgtataaacatagagtcctaacaataccacaaccaatataacgcttacaatccagaagctgcttgtgatgtgccctttaaatgcagcgttgtaaaatacgccgccgaatgatccgcctaaaatcgggccgactaccggaacccatgcgtatttccagtttgatgagcccttccccggaatcggaagaaaagcgtgggctatccgcggacctaagtcacgtgcaggattgatagcatagccggtggtgcctcccagagaaataccgattgctacaatgaggaaaccgacgattaaaggattaagtccttctgtaaattgatttgccccaatggccaagattccaagtacaaggacaaatgtcccaatcacttcgcttaaaacgtttgcaaatgtatgcggaatgctgggccctgttgagaaaacacccagcttggcagcgggatcatccgttgacttccagtgcgggaggtaatgcagataaataatcaccgcaccgatgatcgctccgatcatttgcgccgcaatataaaccggaacctctttccaaggaaaatctcctacaaatgcaagcgctatcgttagcgccggattcaaatgggcaccgctgatgccgccaaccgcgtatgccgccatggcaacacccaatccccatccaaatacaacaacaatccagccagactggaatgaaagcgatttctttaaattgacacctgcacaaacacctgcaccaaaaatgataagcagcatcgtaccgatgacttctccccaaaatgctgtcatagcacattcctcctaaagtcacgattaaaaagcatgatagagaagaagagaataaaaaaaccacaacaaaccgctttacgggtgcataaacatttgccgtaaagagctgctgtggtctccgagttctccatcacaatgtattaacctagtgcaattgtatcagtgcatgaaagcggtgtcaatcactttccgtcaaaaagttttcatattttttccacaatttggtattagacgttgtgacagctacagcccccgctttcaatgcctgctctacatcctcttccgtacggatgaaacccccggcaaagatgggaatccctgttttctcttttatttcctgaatgagtgacggaacgatgccgggaagcacttcgatgaagtcaggcttatgcttgccgataaactccatgcttttctccatcgcgcttgtatcaagcaaaaacaggcgctgaatggcataaattttcttctgcttcgctttggcaatcacgttcgatcttgtggaaataatcccagcgggcttgatatcctggcatataaattccgcaccgtattcgtcatgcttaatcccttgaatgagatcgacgtgcaccatcatgttctttccgtgcttttgcgcttctttgatcacgcccttcagctggccgagatgaatatcaagaataacaccgtaagagaacgaactgttcaaaaactcatcaaattgcttcatattgcgaatagccggtaagatcggctggttgtgaaaactcatcatgtgctcctttaataattcacttttatattatatcgtttgaaagctttctttcaccgttttcacgataaaggaaaggtcctcttctgtcaggcaaaatggcggcgcaagctggatgacattgttgtagccggcgactgtatcgccgtttttgccgatgatcagccctttttctttgcacgccgcaaccacttggtttactttggcggcatcagccggctctttagtcaatttgtctttgacgagttcgattccgatcagcagcccttttcctctaacatccccgactgccgggtgttctctcagagcttgaagctcacctaaaagctttgctccaagatcgcgggatcgctgaatcaactgttcgtcctccataatttgcaggtttttcaacgccaaagcacaggcagccgggcttccgccgaacgtgtttacgtggcggaaacggtcataaggagcttccccctgatacgcttcgaaaatgtcccgtttcacagcagtcgctgacaatggcagatacgcgcttgtgattccctttgccatcgtaatgatatcaggcttcacaccgtagtgcataaacccgaacggctcgcctgtccgtccaaacccgcagatcacttcatcgcaaatcaaaagggctccgtggcgccggcaaatgtcctccaccttcttcatatatccgtccggcggcattaggatgcctccgcctgtaatgatgggctccataatgaccccggcaatcgtttcgcttaattcccatgtcatgatgcggtcgatttcatttgcgctttcaagcgtgtctgcatcatcaggattccggtatatatctggcggagctgcatgcaggaacccttggctcaaaggctcgtatttatatttccgctgcgcctgtccggtagctgagagcgctcccaatgtattgccgtggtatgcccgatatcttgagatgaatttataacggctgtggtcgccgttttgcagatggtactggcgggcaattttaaaagcagtttcgtttgcttccgatccgctgttggaaaaaaagataacataatcgccgccaagccattcattcagcttttccgccagttgaattgcgggtgcgtgactttgcgttaacgggtagtaaggcagctcctttagttgctcataggcagcctccgcaagctcctttctgccgtaaccaatgttgacgcaccacaaaccggacatcgcatccaaatagcggcgtccgtctatgtcggttacccaggccccctcggccttctgggctatcaggctgtccgcttgatgcgctcccttcatggcatgccacacaaattgctcatctttttgctttaatccctgattttgctgaatgttttccatccccatcatctccatttcattagcgttccctataatgccaattcaattgaaacagaccttctctttatgtgatgtcttggtgatgatttccctgccttcaatataaagccagaccgggtcagagtcaataaaccgcgtaaataataaaacatcccctttctcaagaagaaagaggatgcagcttccaaagcaaaacaggcaaagtggcaatgctcagcatcgtactgataaaggtcgcactcgaaacaacttggacagccattgcaatagcaatgtgaagcctagccgttttctgtatgatataggaaatggcgaaaatacagaaactccataaggcacctccactatacctacttttattttaaagacagcacctaaacaattccgcttttgttttaaaaaacccgccaattcaggcgggttttttggaaattattttttatattgaatatgataaatatcacgccgtctgtcttttagctggcgcactgtaccgttttggcgctgtcttctgagaatttccaggtcaacatcgccgatgacaaccatttcaatattcgggtttgtttcgccgacaatgccgtctcgggcgaattcaaaatcagacggggcaaagatgcctgactgggcgtattggatatccatgttttccgtttgcggaaggtttccgaccgttccagagataaccgtataaatttgattttcaaccgctctagcctgcgaacagtatctgacacgcagatagccttgacggtcttctgtacaaaatggcgtaaagatgattttggctcctttatcagccgcaatccgggcaagctcaggaaattcaatgtcataacagatctggatcgcgattttcccgcagtccgtatcaaacacgcgaacttggtctcctgcgctgatcccccaccatttgcgttcattcggcgtaatatggagtttgtattgcttttcgattgttccgtcccgtctgaacaggtaagcgatattatagatcttgccttcctcttcgacgaaatgagatccgccgataatgttgacgttatacttcacagccaagtcagtaaacaggctgatgtaatcttctgtatactcggtaattctctgcaccgccaagctcggtgaccgttcctcaaggaaagacatcagctgggttgtgaaaatttccgggaacaccgcaaaatcagatcttgcgtcggaagcaacatcgacatagtattctacttgattcgcaaattcctcaaaggaataaattttcttcatttcgtattggatcacacaaattctaacagggaacgccgatttataatagcgttttgtctgctgcggtagataatcgacattattccattccatcagcgtcgcatacttgatcgaagctgtatcatctgggagataattcgggttaattcgcataagggtaaagccgttcatcagctgaaaagaaagaaccggatcgtatatttggtggcgtgtcacctgttcaacatactctctcgctgtcatttcatctgcatatttgtgatagtttggaatccgtccgcctatgatgatgcttttcaggtttaagcgtctggctaagtcctttctcgcctcgtacaaacggtggccgatcttcattcgtctgtatttcgggtgcaccatgacttcaattccgtacatattcaagccgtcaggattatggttggtgatataaccgtcatctgtaatgtcctgccacgtatggcggtcatcatattcatcaaagttaatcaggagacttgagcacgaaccgataatttcaccttcgaattctgcacaaaactgcccgtctggaaaatgctccaaatggctgattaaatgctctcgcttccaaggttccatccccggaaagcagtccttttgaagatcgataatcttgtcgatgtctttctcttcgatattgcggataaccattttcttttcaaaccgggtcaaatctaatttctcagacaacctactcgctcctttctagttttgtgagttcagatgatcaagcaatagggcgagctccatttccgccattgattcaagcctgtgatcatagtcttcaaacatcaaggtgcccgttactttattcgggacaatgacacacttcattcctgcacgtttcgcagcaatcgaaccattgacagaatcctcaaacgcgagacattccgctggcgatacccccaggttctttgccgccaataaatagagttcaggattcggcttcacctcttccacatcatcagccgtttgaataacttcaaaatcatcaaacaggccgatttgcttcaaatggccggacacccatttataatcagagctggaggcaaggcctatttttaagcctaaatcctttgccgcattcaaatacgcttcgacaccaggtctcgctttttctgtttccatgcgtttggcgaaccgctctcttctcaattgtgtgagctcttcatggttcagctttttcccgatctgctcttctaaatattcaaaaggccggaaacccgcagcagttccgatgacctttccccagacagatagcggcagcactgagccgtgctcttcaaatatttcctgaagaacctcatattcgtgtgtttctgtatctagaataagcccgtcaaaatcaaaaattaacgctttaatcactgggtacaactcctttagtacgaattgagacatatgtatacactcactataccccgaaacaagtctgctttcaaaaagtaaggttttatgtgaagaaagagcctgcacactgcaagctctttcttattaatgaatgttttggtgagaaatgtttgtcagcgctgatcccgcagactcgttcgacatctgattgactgccaggtctccaagcgcaacgatcccgactagattgttttgatctacaataggaaggcggcggatttggtgctgggccatcagctgcgacgcgtcttccagactcatattagggtttcctgatacgagttctgttgacatcacttctgaaacgggtgtctggccatcacggccctgagctgtagttcttaatgcaatgtcacggtcagtcagcattccttttaaaacaccttgctctacaacggggatcgccccgacgttatgctgtttcattagagaagccgcttcctgaatcgtttgattcggagaaacggttgccacctgcgttgtcattgtatctttaactgaactcattgtcagcacccctttcaatcattagtatgttcagacacgagccgtttaaaaagggagttagaggaaaggttttatgatatgatttctctgatacaaaaagagcttttctaaaaatagaaaagcccttgccgcatgattatatcagccttctttgaccgaaaaaggctttgttagtcttcttttgaaagtcagaaaaagcaaacggaaaataaatcccaaaatcattcagcatcttgctgtttttttcaaaaatcgcctgatcactcaaatcagagtgcggcgaaggcttggtcaggataatatgtatcatttgcagacaagccataatttgaaatgcttcttttaatgttccttggtaataatggttatttaaagacagaacgcctttctttttaaagcgctgaatgtccagttcggagaaataaagaggaaatacatcatggatcagctccatagtcagctccttgataaagctctcctgttctgcagttgctgcgttcacaattctcacgtcaatcacctttcttgccatcgaatatcctaagtcttactcaagaatagcacagaaaaaaacgcgaaagctaaggtaagtgtttcctatgagaaacagcagccttccgcttcgaaaaggagccatttaacatgaaccaaaaaggcagagggcttgagatcctcatcaatgaaaaacaggacggccaatggctgttttccgtactcaaaacagcgctcaaagcttctaaaccagtgatacaagactggatgtcccatcaacagataaaggtcaatcacgaatcggtcttaaacaatatgattgtaaaaaagggagaccgcgtgttcattgatcttcaggaaattgaagcatcttcggtcattccggagtatggcgagcttgatattttatatgaggacaatcatatgctcatcgtcaataaacccgctggcatcgcgacgcatccgaatgaggatgggcaaaccggcacactggctaatttgatcgcgtatcattatcagataaatggcgaaacatgtaaggtgcgccacgtccatcgtcttgatcaggatacatctggcgctatcgtttttgccaagcatcgtttggcacacgccatcttagaccagcagttagagaaaaagacgctgaagcgtacgtataccgctatcgctgaaggtaagctacggacgaaaaaagggacaattaattcaccgatcggcagagaccgctcacacccgacaagacgccgggtttcaccaggcgggcaaacagccgtcactcatttcaaggtaatggccagcaatgcgaaagaacggctgtcgctcgttgaattagagctggaaacaggcagaacacaccaaatccgtgttcatctggcgagcctcggccatccgttgacaggagactcgctttacggaggcgggagcaagctgctaaacaggcaggcactgcacgccaataaagtacaagcggttcacccgataacagacgagctcatagttgctgaagcccctttccctgctgatatgaaaaacctttgccgcacatatttttcatgaagaaaagccgcaggcactgcctcggctttttaagtcactcgttttccatatataatatagcgcttcggggcatttccgacgtatgaaaacggatagcaggtcgtcagaatcagctcttccttttcatgctggagcgtgataatagatgtgtcatccttatcgacaatttttgtttttacaatttcatatgtgaattctccatatgacaggagaagacggagctgatcccccttttccagctctcccgtccggcgaaacacggtatcccgatgtcccgacagcacaatttgtccgttttcatcaggataatagctgtccttgtaatgcccgacacctttttctaaatcatcagcatcggtgccctccacgattggaagctctgcattgattttcggtatttccaaaatgccgctcgcttggccggtctcaggcttaaatgatgctttgttctttgcttgatctgtgctatttttcgtccccaaaagttcctgcggcttttctgccgccagttttgcttcttttaatgtctgttccgttttcatattcgtatcgattaatttaaagcctccatagcctgcgatcactaggccggcagcaatgatgaatagtggaataacttttttcacgttctggaggcgctcctttttcttctgacatatagataagttcctgacaatgtcaccgcagcaccgattaccataaagttatagtagcccgctgacgtatccggaagctgatgatcagacccgctttccgcagtctcggtttgtaacggcaatgtgctgatgctattagcagtatcagcggtttttgtgttgttgattggtatttcattgaatctcgaaatggctgaaggcggaagctgatgaaccggtgctgttcccggagtttcttttatatcaggcaaatcttcatctggccttggatcctctttaatcggatcttccgtccccggatcatctccaggctcttccgtaatcgggtcttctgttacagggtcttcaatatcactggtttcagcaagcttaattcttccctcttttgtatacgcaattggctcatcaaaactcttcacgtactcaactgtcgcttccaaatcctcaggccctgtcaccggattttttcccagcagtccgattggctgatatttggctcctgtcgccgtcgccataaagttgttgacggtcaatgtatatgtggcatcgggctggatctcggtgccatctgccattttcaaatcaactgcttttccggtttctttatcccacgtatacgtaaacccgctgatgctgtagtcaggcccaaaaaccggcgagatttgagcattgataatctctcttaaatcttttcctttaatctcaagcttcgttaacacatttccaaacggctgaatattgtaaagatctccccacgtaatcgggcccttcttcaacgcttcacgtatgccgccgccattcataagggcaaaatccgttttcatggcagctctcatgccatccgcaatcaggtttccaagaggtgtatcgccgtcatttgaataccccccttccatatcaacagcggcttcgccgactacctcgctgataatcggttccgcaattgtttcgtatttctttaaaatggctgacgcgctgacatccggttcgattttactttgatcaacatatacgatttccgcggactttttgacaatgtcttttgtcgttttatcgatctctacatcaacgacacctatcgcttttccatattcaaacgcttgaacaatcagttttccattcacttcaccgttaacaacctgatgattatgcgcggcaaaaatcacgtcaatttcagaatctgttttgtttgcaagatcagcagactcaccggtaatggcgttgctgttttgttcagctgacatatgtgcgagaaccgcgatggccttcacgccttttttcttgagctcttcggccgccttattcaccgctgttgcttcatctgtaaactcgatattttttattccttcaggcataaccatgccagctgccgactgtgtgacaaccccgataaaagcaacgggtacgccctccacatttatgatgtcataagccggcaaaaagggctctccagttgatttcattttacaattggcacatacaaggggaaagttctgtccatcatatccgcttgtgcctttcggatgatcaccgccatttaagatcctcagaagttcatccgtgccttcatcaaattcatggtttcccacggttccgacatcaaatccgatgtcctccatcagttctacagtcggttcatcttgaagaagagaggaaactggagagcttccgccgatcatatctcccgcgtgcacaatcagcgagtttttcttttcagcctttttttcttttaaatatgcggcggcataatcc
